(19) United States
(12) Patent Application Publication
(10) Pub. No.: US 2005/0271676 A1
(43) Pub. Date: Dec. 8, 2005

(54) Inducing cellular immune responses to human immunodeficiency virus-1 using peptide and nucleic acid compositions

(75) Inventors: Alessandro Sette, La Jolla, CA (US); John Sidney, San Diego, CA (US); Scott Southwood, Santee, CA (US); Brian D. Livingston, San Diego, CA (US); Robert Chesnut, Cardiff-by-the-Sea, CA (US); Denise Marie Baker, San Diego, CA (US); Esteban Celis, Rochester, MN (US); Ralph T. Kubo, Carlsbad, CA (US); Howard M. Grey, La Jolla, CA (US)

Correspondence Address: STERNE, KESSLER, GOLDSTEIN & FOX PLLC, 1100 NEW YORK AVENUE, N.W., WASHINGTON, DC, 20005, US

(73) Assignee: Epimmune Inc.

(21) Appl. No.: 11/045,024

(22) Filed: Jan. 28, 2005

Related U.S. Application Data
(63) Continuation of application No. 09/412,863, filed on Oct. 5, 1999, now abandoned.
Application No. 09/412,863 is a continuation-in-part of application No. 08/347,610, filed on Dec. 1, 1994, now abandoned.
Application No. 08/347,610 is a continuation-in-part of application No. 08/159,339, filed on Nov. 29, 1993, now Pat. No. 6,037,135.
Application No. 08/159,339 is a continuation-in-part of application No. 08/103,396, filed on Aug. 6, 1993, now abandoned.
Application No. 09/412,863 is a continuation-in-part of application No. 08/205,713, filed on Mar. 4, 1994, now abandoned.
Application No. 08/205,713 is a continuation-in-part of application No. 08/159,184, filed on Nov. 29, 1993, now abandoned.
Application No. 08/159,184 is a continuation-in-part of application No. 08/073,205, filed on Jun. 4, 1993, now abandoned.
Application No. 08/073,205 is a continuation-in-part of application No. 08/027,146, filed on Mar. 5, 1993, now abandoned.

(51) Int. Cl. C07H 21/04; A61K 39/00

(52) U.S. Cl. 424/185.1; 435/69.3; 435/320.1; 435/325; 536/23.5; 530/326; 530/327

(57) ABSTRACT

This invention uses our knowledge of the mechanisms by which antigen is recognized by T cells to identify and prepare human immunodeficiency virus (HIV) epitopes, and to develop epitope-based vaccines directed towards HIV. More specifically, this application communicates our discovery of pharmaceutical compositions and methods of use in the prevention and treatment of HIV infection.

### CROSS REFERENCES TO RELATED APPLICATIONS

[0001] This application is a continuation of U.S. application Ser. No. 09/412,863, filed Oct. 5, 1999; said Ser. No. 09/412,863 is a continuation-in-part of U.S. application Ser. No. 08/347,610, filed Dec. 1, 1994, abandoned; which is a continuation-in-part of U.S. application Ser. No. 08/159,339, filed Nov. 29, 1993, now U.S. Pat. No. 6,037,135; which is a continuation-in-part of U.S. application Ser. No. 08/103,396, filed Aug. 6, 1993, abandoned; said Ser. No. 09/412,863 is a continuation-in-part of U.S. application Ser. No. 08/205,713, filed Mar. 4, 1994, abandoned; which is a continuation-in-part of U.S. application Ser. No. 08/159,184, filed Nov. 29, 1993, abandoned; which is a continuation-in-part of U.S. application Ser. No. 08/073,205, filed Jun. 4, 1993, abandoned; which is a continuation-in-part of U.S. application Ser. No. 08/027,146, filed Mar. 5, 1993, abandoned; all of which are herein incorporated by reference.

### FEDERALLY SPONSORED RESEARCH AND DEVELOPMENT

[0002] This invention was funded, in part, by the United States government under grants with the National Institutes of Health. The U.S. government has certain rights in this invention.

### INDEX

[0003] I. Background of the Invention
[0004] II. Summary of the Invention
[0005] III. Brief Description of the FIGS.
[0006] IV. Detailed Description of the Invention
   [0007] A. Definitions
   [0008] B. Stimulation of CTL and HTL responses
   [0009] C. Binding Affinity of Peptide Epitopes for HLA Molecules
   [0010] D. Peptide Epitope Binding Motifs and Supermotifs
      [0011] 1. HLA-A1 supermotif
      [0012] 2. HLA-A2 supermotif
      [0013] 3. HLA-A3 supermotif
      [0014] 4. HLA-A24 supermotif
      [0015] 5. HLA-B7 supermotif
      [0016] 6. HLA-B27 supermotif
      [0017] 7. HLA-B44 supermotif
      [0018] 8. HLA-B58 supermotif
      [0019] 9. HLA-B62 supermotif
      [0020] 10. HLA-A1 motif
      [0021] 11. HLA-A2.1 motif
      [0022] 12. HLA-A3 motif
      [0023] 13. HLA-A11 motif
      [0024] 14. HLA-A24 motif
      [0025] 15. HLA-DR-1-4-7 supermotif
      [0026] 16. HLA-DR3 motifs
   [0027] E. Enhancing Population Coverage of the Vaccine
   [0028] F. Immune Response-Stimulating Peptide Epitope Analogs
   [0029] G. Computer Screening of Protein Sequences from Disease-Related Antigens for Supermotif- or Motif-Containing Epitopes
   [0030] H. Preparation of Peptide Epitopes
   [0031] I. Assays to Detect T-Cell Responses
   [0032] J. Use of Peptide Epitopes for Evaluating Immune Responses
   [0033] K. Vaccine Compositions
      [0034] 1. Minigene Vaccines
      [0035] 2. Combinations of CTL Peptides with Helper Peptides
   [0036] L. Administration of Vaccines for Therapeutic or Prophylactic Purposes
   [0037] M. Kits
[0038] V. Examples
[0039] VI. Claims
[0040] VII. Abstract

### I. BACKGROUND OF THE INVENTION

[0041] Acquired immunodeficiency syndrome (AIDS) caused by infection with human immunodeficiency virus-1 (HIV-1) represents a major world health problem. Estimates indicate that about 16,000 people worldwide are infected with HIV each day.

[0042] The development of anti-viral drugs has been a major advancement in reducing viral loads in HIV infected patients. Highly active retroviral therapy (HAART) has been shown to reduce viremia to nearly undetectable levels. However, current drug therapies are not practicable as a long term solution to the HIV epidemic. HAART therapy is severely limited due to poor tolerance for the drugs and the emergence of drug-resistant virus. Moreover, replication competent HIV persists in the lymphoid tissue of patients who have responded to HAART, thus serving as a reservoir of virus. Lastly, current anti-retroviral drug therapies have little impact upon the global epidemic: almost 90% of the world's HIV infected population resides within countries lacking financial resources for these drugs. Thus, a need exists for an efficacious vaccine to both prevent and treat HIV infection.

[0043] Virus-specific, human leukocyte antigen (HLA) class I-restricted cytotoxic T lymphocytes (CTL) are known to play a major role in the prevention and clearance of virus infections in vivo (Oldstone et al., Nature 321:239, 1989; Jamieson et al., J. Virol. 61:3930, 1987; Yap et al, Nature 273:238, 1978; Lukacher et al., J. Exp. Med. 160:814, 1994; McMichael et al., N. Engl. J. Med. 309:13, 1983; Sethi et al., J. Gen. Virol. 64:443, 1983; Watari et al., J. Exp. Med. 165:459, 1987; Yasukawa et al., J. Immunol. 143:2051, 1989; Tigges et al., J. Virol. 66:1622, 1993; Reddenhase et al., J. Virol. 55:263, 1985; Quinnan et al., N. Engl. J. Med. 307:6, 1982). HLA class I molecules are expressed on the surface of almost all nucleated cells. Following intracellular processing of antigens, epitopes from the antigens are presented as a complex with the HLA class I molecules on the surface of such cells. CTL recognize the peptide-HLA class I complex, which then results in the destruction of the cell bearing the HLA-peptide complex directly by the CTL and/or via the activation of non-destructive mechanisms e.g., the production of interferon, that inhibit viral replication.

[0044] While immune correlates of protective immunity against HIV infection are not well defined, there is a growing body of evidence that suggests CTL are important in controlling HIV infection. HIV-specific CTL responses can be detected early in infection and the appearance of the responses corresponds to the time in infection at which initial viremia is reduced (Pantaleo et al., Nature 370:463, 1994; Walker et al., Proc. Natl. Acad. Sci. 86:9514, 1989). In addition, HIV replication in infected lymphocytes can be inhibited by incubation with autologous CTL (see, e.g., Tsubota et al., J. Exp. Med. 169:1421, 1989). These data are supported by recent studies that indicate CTL are required for controlling viral replication in a SIV/rhesus animal model (Schmitz et al., Science 283:857, 1999), and additionally supported by studies that demonstrate that CTL exert selective pressure on HIV populations as evidenced by the eventual predominance of viruses with amino acid replacements in those regions of the virus to which CTL responses are directed (see, e.g., Borrow et al., Nature Med. 3:205-211, 1997; Price et al., Proc. Nat. Acad. Sci. 94:12890-1895, 1997; Koenig et al., Nature Med. 1:330-336, 1995; and Haas et al., J. Immunol. 157:4212-4221, 1996)

[0045] Virus-specific T helper lymphocytes are also known to be critical for maintaining effective immunity in chronic viral infections. Historically, HTL responses were viewed as primarily supporting the expansion of specific CTL and B cell populations; however, more recent data indicate that HTL may directly contribute to the control of virus replication. For example, a decline in CD4⁺ T cells and a corresponding loss in HTL function characterize infection with HIV (Lane et al., New Engl. J. Med. 313:79, 1985). Furthermore, studies in HIV infected patients have also shown that there is an inverse relationship between virus-specific HTL responses and viral load, suggesting that HTL play a role in viremia (see, e.g., Rosenberg et al., Science 278:1447, 1997).

[0046] A fundamental challenge in the development of an efficacious HIV vaccine is the heterogeneity observed in HIV. The virus, like other retroviruses, rapidly mutates during replication resulting in the generation of virus that can escape anti-viral therapy and immune recognition (Borrow et al., Nature Med. 3:205, 1997). In addition, HIV can be classified into a variety of subtypes that exhibit significant sequence divergence (see, e.g., Lukashov et al., AIDS 12:S43, 1998). In view of the heterogeneous nature of HIV, and the heterogeneous immune response observed with HIV infection, induction of a multi-specific cellular immune response directed simultaneously against multiple HIV epitopes appears to be important for the development of an efficacious vaccine against HIV. There is a need to establish such vaccine embodiments which elicit immune responses of sufficient breadth and vigor to prevent and/or clear HIV infection.

[0047] The epitope approach, as we have described, may represent a solution to this challenge, in that it allows the incorporation of various antibody, CTL and HTL epitopes, from various proteins, in a single vaccine compositions. Such a composition may simultaneously target multiple dominant and subdominant epitopes and thereby be used to achieve effective immunization in a diverse population.

[0048] The information provided in this section is intended to disclose the presently understood state of the art as of the filing date of the present application. Information is included in this section which was generated subsequent to the priority date of this application. Accordingly, information in this section is not intended, in any way, to delineate the priority date for the invention.

### II. SUMMARY OF THE INVENTION

[0049] This invention applies our knowledge of the mechanisms by which antigen is recognized by T cells, for example, to develop epitope-based vaccines directed towards-HIV. More specifically, this application communicates our discovery of specific epitope pharmaceutical compositions and methods of use in the prevention and treatment of HIV infection.

[0050] Upon development of appropriate technology, the use of epitope-based vaccines has several advantages over current vaccines, particularly when compared to the use of whole antigens in vaccine compositions. There is evidence that the immune response to whole antigens is directed largely toward variable regions of the antigen, allowing for immune escape due to mutations. The epitopes for inclusion in an epitope-based vaccine may be selected from conserved regions of viral or tumor-associated antigens, which thereby reduces the likelihood of escape mutants. Furthermore, immunosuppressive epitopes that may be present in whole antigens can be avoided with the use of epitope-based vaccines.

[0051] An additional advantage of an epitope-based vaccine approach is the ability to combine selected epitopes (CTL and HTL), and further, to modify the composition of the epitopes, achieving, for example, enhanced immunogenicity. Accordingly, the immune response can be modulated, as appropriate, for the target disease. Similar engineering of the response is not possible with traditional approaches.

[0052] Another major benefit of epitope-based immune-stimulating vaccines is their safety. The possible pathological side effects caused by infectious agents or whole protein antigens, which might have their own intrinsic biological activity, is eliminated.

[0053] An epitope-based vaccine also provides the ability to direct and focus an immune response to multiple selected antigens from the same pathogen. Thus, patient-by-patient variability in the immune response to a particular pathogen may be alleviated by inclusion of epitopes from multiple antigens from the pathogen in a vaccine composition. In the case of HIV, epitopes derived from multiple strains may also be included. A “pathogen” may be an infectious agent or a tumor associated molecule.

[0054] One of the most formidable obstacles to the development of broadly efficacious epitope-based immunotherapeutics, however, has been the extreme polymorphism of HLA molecules. To date, effective non-genetically biased coverage of a population has been a task of considerable complexity; such coverage has required that epitopes be used that are specific for HLA molecules corresponding to each individual HLA allele.

[0055] Impractically large numbers of epitopes would therefore have to be used in order to cover ethnically diverse populations. Thus, there has existed a need for peptide epitopes that are bound by multiple HLA antigen molecules for use in epitope-based vaccines. The greater the number of HLA antigen molecules bound, the greater the breadth of population coverage by the vaccine.

[0056] Furthermore, as described herein in greater detail, a need has existed to modulate peptide binding properties, e.g., so that peptides that are able to bind to multiple HLA antigens do so with an affinity that will stimulate an immune response. Identification of epitopes restricted by more than one HLA allele at an affinity that correlates with immunogenicity is important to provide thorough population coverage, and to allow the elicitation of responses of sufficient vigor to prevent or clear an infection in a diverse segment of the population. Such a response can also target a broad array of epitopes. The technology disclosed herein provides for such favored immune responses.

[0057] In a preferred embodiment, epitopes for inclusion in vaccine compositions of the invention are selected by a process whereby protein sequences of known antigens are evaluated for the presence of motif or supermotif-bearing epitopes. Peptides corresponding to a motif- or supermotif-bearing epitope are then synthesized and tested for the ability to bind to the HLA molecule that recognizes the selected motif. Those peptides that bind at an intermediate or high affinity i.e., an IC₅₀ (or a K_{D} value) of 500 nM or less for HLA class I molecules or an IC₅₀ of 1000 nM or less for HLA class II molecules, are further evaluated for their ability to induce a CTL or HTL response. Immunogenic peptide epitopes are selected for inclusion in vaccine compositions.

[0058] Supermotif-bearing peptides may additionally be tested for the ability to bind to multiple alleles within the HLA supertype family. Moreover, peptide epitopes may be analogued to modify binding affinity and/or the ability to bind to multiple alleles within an HLA supertype.

[0059] The invention also includes embodiments comprising methods for monitoring or evaluating an immune response to HIV in a patient having a known HLA-type. Such methods comprise incubating a T lymphocyte sample from the patient with a peptide composition comprising an HIV epitope that has an amino acid sequence described in Tables VII to Table XX which binds the product of at least one HLA allele present in the patient, and detecting for the presence of a T lymphocyte that binds to the peptide. A CTL peptide epitope may, for example, be used as a component of a tetrameric complex for this type of analysis.

[0060] An alternative modality for defining the peptide epitopes in accordance with the invention is to recite the physical properties, such as length; primary structure; or charge, which are correlated with binding to a particular allele-specific HLA molecule or group of allele-specific HLA molecules. A further modality for defining peptide epitopes is to recite the physical properties of an HLA binding pocket, or properties shared by several allele-specific HLA binding pockets (e.g. pocket configuration and charge distribution) and reciting that the peptide epitope fits and binds to the pocket or pockets.

[0061] As will be apparent from the discussion below, other methods and embodiments are also contemplated. Further, novel synthetic peptides produced by any of the methods described herein are also part of the invention.

### III. BRIEF DESCRIPTION OF THE FIGURES

[0062] FIG. 1: FIG. 1 provides a graph of total frequency of genotypes as a function of the number of PF candidate epitopes bound by HLA-A and B molecules, in an average population.

[0063] FIG. 2: FIG. 2 illustrates the position of peptide epitopes in an experimental model minigene construct.

### IV. DETAILED DESCRIPTION OF THE INVENTION

[0064] The peptide epitopes and corresponding nucleic acid compositions of the present invention are useful for stimulating an immune response to HIV by stimulating the production of CTL or HTL responses. The peptide epitopes, which are derived directly or indirectly from native HIV protein amino acid sequences, are able to bind to HLA molecules and stimulate an immune response to HIV. The complete sequence of the HIV proteins to be analyzed can be obtained from Genbank. Peptide epitopes and analogs thereof can also be readily determined from sequence information that may subsequently be discovered for heretofore unknown variants of HIV, as will be clear from the disclosure provided below.

[0065] The peptide epitopes of the invention have been identified in a number of ways, as will be discussed below. Also discussed in greater detail is that analog peptides have been derived and the binding activity for HLA molecules modulated by modifying specific amino acid residues to create peptide analogs exhibiting altered immunogenicity. Further, the present invention provides compositions and combinations of compositions that enable epitope-based vaccines that are capable of interacting with HLA molecules encoded by various genetic alleles to provide broader population coverage than prior vaccines.

IV.A. Definitions

[0066] The invention can be better understood with reference to the following definitions, which are listed alphabetically: A “computer” or “computer system” generally includes: a processor; at least one information storage/retrieval apparatus such as, for example, a hard drive, a disk drive or a tape drive; at least one input apparatus such as, for example, a keyboard, a mouse, a touch screen, or a microphone; and display structure. Additionally, the computer may include a communication channel in communication with a network. Such a computer may include more or less than what is listed above.

[0067] “Cross-reactive binding” indicates that a peptide is bound by more than one HLA molecule; a synonym is degenerate binding.

[0068] A “cryptic epitope” elicits a response by immunization with an isolated peptide, but the response is not cross-reactive in vitro when intact whole protein which comprises the epitope is used as an antigen.

[0069] A “dominant epitope” is an epitope that induces an immune response upon immunization with a whole native antigen (see, e.g., Sercarz, et al., Annu. Rev. Immunol. 11:729-766, 1993). Such a response is cross-reactive in vitro with an isolated peptide epitope.

[0070] With regard to a particular amino acid sequence, an “epitope” is a set of amino acid residues which is involved in recognition by a particular immunoglobulin, or in the context of T cells, those residues necessary for recognition by T cell receptor proteins and/or Major Histocompatibility Complex (NMHC) receptors. In an immune system setting, in vivo or in vitro, an epitope is the collective features of a molecule, such as primary, secondary and tertiary peptide structure, and charge, that together form a site recognized by an immunoglobulin, T cell receptor or HLA molecule. Throughout this disclosure epitope and peptide are often used interchangeably. It is to be appreciated, however, that isolated or purified protein or peptide molecules larger than and comprising an epitope of the invention are still within the bounds of the invention. “Human Leukocyte Antigen” or “HLA” is a human class I or class II Major Histocompatibility Complex (MHC) protein (see, e.g., Stites, et al., IMMUNOLOGY, 8^{TH} ED., Lange Publishing, Los Altos, Calif. (1994).

[0071] An “HLA supertype or family”, as used herein, describes sets of HLA molecules grouped on the basis of shared peptide-binding specificities. HLA class I molecules that share somewhat similar binding affinity for peptides bearing certain amino acid motifs are grouped into HLA supertypes. The terms HLA superfamily, HLA supertype family, HLA family, and HLA xx-like molecules (where xx denotes a particular HLA type), are synonyms.

[0072] Throughout this disclosure, results are expressed in terms of “IC₅₀'s.” IC₅₀ is the concentration of peptide in a binding assay at which 50% inhibition of binding of a reference peptide is observed. Given the conditions in which the assays are run (i.e., limiting HLA proteins and labeled peptide concentrations), these values approximate K_{D} values. Assays for determining binding are described in detail, e.g. in PCT publications WO 94/20127 and WO 94/03205. It should be noted that IC₅₀ values can change, often dramatically, if the assay conditions are varied, and depending on the particular reagents used (e.g., HLA preparation, etc.). For example, excessive concentrations of HLA molecules will increase the apparent measured IC₅₀ of a given ligand.

[0073] Alternatively, binding is expressed relative to a reference peptide. Although as a particular assay becomes more, or less, sensitive, the IC₅₀'s of the peptides tested may change somewhat, the binding relative to the reference peptide will not significantly change. For example, in an assay run under conditions such that the IC₅₀ of the reference peptide increases 10-fold, the IC₅₀ values of the test peptides will also shift approximately 10-fold. Therefore, to avoid ambiguities, the assessment of whether a peptide is a good, intermediate, weak, or negative binder is generally based on its IC₅₀, relative to the IC₅₀ of a standard peptide.

[0074] Binding may also be determined using other assay systems including those using: live cells (e.g., Ceppellini et al., Nature 339:392, 1989; Christnick et al., Nature 352:67, 1991; Busch et al., Int. Immunol. 2:443, 19990; Hill et al., J. Immunol. 147:189, 1991; del Guercio et al., J. Immunol. 154:685, 1995), cell free systems using detergent lysates (e.g., Cerundolo et al., J. Immunol. 21:2069, 1991), immobilized purified MHC (e.g., Hill et al., J. Immunol. 152, 2890, 1994; Marshall et al., J. Immunol. 152:4946, 1994), ELISA systems (e.g., Reay et al., EMBO J. 11:2829, 1992), surface plasmon resonance (e.g., Khilko et al., J. Biol. Chem. 268:15425, 1993); high flux soluble phase assays (Hammer et al., J. Exp. Med. 180:2353, 1994), and measurement of class I MHC stabilization or assembly (e.g., Ljunggren et al., Nature 346:476, 1990; Schumacher et al., Cell 62:563, 1990; Townsend et al., Cell 62:285, 1990; Parker et al., J. Immunol. 149:1896, 1992).

[0075] As used herein, “high affinity” with respect to HLA class I molecules is defined as binding with an IC₅₀, or K_{D} value, of 50 nM or less; “intermediate affinity” is binding with an IC₅₀ or K_{D} value of between about 50 and about 500 nM. “High affinity” with respect to binding to HLA class II molecules is defined as binding with an IC₅₀ or K_{D} value of 100 nM or less; “intermediate affinity” is binding with an IC₅₀ or K_{D} value of between about 100 and about 1000 nM. The terms “identical” or percent “identity,” in the context of two or more peptide sequences, refer to two or more sequences or subsequences that are the same or have a specified percentage of amino acid residues that are the same, when compared and aligned for maximum correspondence over a comparison window, as measured using a sequence comparison algorithm or by manual alignment and visual inspection.

[0076] An “immunogenic peptide” or “peptide epitope” is a peptide that comprises an allele-specific motif or supermotif such that the peptide will bind an HLA molecule and induce a CTL and/or HTL response. Thus, immunogenic peptides of the invention are capable of binding to an appropriate HLA molecule and thereafter inducing a cytotoxic T cell response, or a helper T cell response, to the antigen from which the immunogenic peptide is derived.

[0077] The phrases “isolated” or “biologically pure” refer to material which is substantially or essentially free from components which normally accompany the material as it is found in its native state. Thus, isolated peptides in accordance with the invention preferably do not contain materials normally associated with the peptides in their in situ environment.

[0078] “Major Histocompatibility Complex” or “MHC” is a cluster of genes that plays a role in control of the cellular interactions responsible for physiologic immune responses.

[0079] In humans, the MHC complex is also known as the HLA complex. For a detailed description of the MHC and HLA complexes, see, Paul, FUNDAMENTAL IMMUNOLOGY, 3^{RD} ED., Raven Press, New York, 1993.

[0080] The term “motif” refers to the pattern of residues in a peptide of defined length, usually a peptide of from about 8 to about 13 amino acids for a class I HLA motif and from about 6 to about 25 amino acids for a class II HLA motif, which is recognized by a particular HLA molecule. Peptide motifs are typically different for each protein encoded by each human HLA allele and differ in the pattern of the primary and secondary anchor residues.

[0081] A “negative binding residue” or “deleterious residue” is an amino acid which, if present at certain positions (typically not primary anchor positions) in a peptide epitope, results in decreased binding affinity of the peptide for the peptide's corresponding HLA molecule.

[0082] The term “peptide” is used interchangeably with “oligopeptide” in the present specification to designate a series of residues, typically L-amino acids, connected one to the other, typically by peptide bonds between the α-amino and carboxyl groups of adjacent amino acids. The preferred CTL-inducing peptides of the invention are 13 residues or less in length and usually consist of between about 8 and about 11 residues, preferably 9 or 10 residues. The preferred HTL-inducing oligopeptides are less than about 50 residues in length and usually consist of between about 6 and about 30 residues, more usually between about 12 and 25, and often between about 15 and 20 residues. “Pharmaceutically acceptable” refers to a non-toxic, inert, and/or physiologically compatible composition.

[0083] A “primary anchor residue” is an amino acid at a specific position along a peptide sequence which is understood to provide a contact point between the immunogenic peptide and the HLA molecule. One to three, usually two, primary anchor residues within a peptide of defined length generally defines a “motif” for an immunogenic peptide. These residues are understood to fit in close contact with peptide binding grooves of an HLA molecule, with their side chains buried in specific pockets of the binding grooves themselves. In one embodiment, for example, the primary anchor residues are located at position 2 (from the amino terminal position) and at the carboxyl terminal position of a 9-residue peptide epitope in accordance with the invention. The primary anchor positions for each motif and supermotif are set forth in Table 1. For example, analog peptides can be created by altering the presence or absence of particular residues in these primary anchor positions. Such analogs are used to modulate the binding affinity of a peptide comprising a particular motif or supermotif.

[0084] “Promiscuous recognition” is where a distinct peptide is recognized by the same T cell clone in the context of various HLA molecules. Promiscuous recognition or binding is synonymous with cross-reactive binding.

[0085] A “protective immune response” or “therapeutic immune response” refers to a CTL and/or an HTL response to an antigen derived from an infectious agent or a tumor antigen, which prevents or at least partially arrests disease symptoms or progression. The immune response may also include an antibody response which has been facilitated by the stimulation of helper T cells.

[0086] The term “residue” refers to an amino acid or amino acid mimetic incorporated into an oligopeptide by an amide bond or amide bond mimetic.

[0087] A “secondary anchor residue” is an amino acid at a position other than a primary anchor position in a peptide which may influence peptide binding. A secondary anchor residue occurs at a significantly higher frequency amongst bound peptides than would be expected by random distribution of amino acids at one position. The secondary anchor residues are said to occur at “secondary anchor positions.” A secondary anchor residue can be identified as a residue which is present at a higher frequency among high or intermediate affinity binding peptides, or a residue otherwise associated with high or intermediate affinity binding. For example, analog peptides can be created by altering the presence or absence of particular residues in these secondary anchor positions. Such analogs are used to finely modulate the binding affinity of a peptide comprising a particular motif or supermotif.

[0088] A “subdominant epitope” is an epitope which evokes little or no response upon immunization with whole antigens which comprise the epitope, but for which a response can be obtained by immunization with an isolated peptide, and this response (unlike the case of cryptic epitopes) is detected when whole protein is used to recall the response in vitro or in vivo.

[0089] A “supermotif” is a peptide binding specificity shared by HLA molecules encoded by two or more HLA alleles. Preferably, a supermotif-bearing peptide is recognized with high or intermediate affinity (as defined herein) by two or more HLA antigens.

[0090] “Synthetic peptide” refers to a peptide that is not naturally occurring, but is man-made using such methods as chemical synthesis or recombinant DNA technology.

[0091] The nomenclature used to describe peptide compounds follows the conventional practice wherein the amino group is presented to the left (the N-terminus) and the carboxyl group to the right (the C-terminus) of each amino acid residue. When amino acid residue positions are referred to in a peptide epitope they are numbered in an amino to carboxyl direction with position one being the position closest to the amino terminal end of the epitope, or the peptide or protein of which it may be a part. In the formulae representing selected specific embodiments of the present invention, the amino- and carboxyl-terminal groups, although not specifically shown, are in the form they would assume at physiologic pH values, unless otherwise specified. In the amino acid structure formulae, each residue is generally represented by standard three letter or single letter designations. The L-form of an amino acid residue is represented by a capital single letter or a capital first letter of a three-letter symbol, and the D-form for those amino acids having D-forms is represented by a lower case single letter or a lower case three letter symbol. Glycine has no asymmetric carbon atom and is simply referred to as “Gly” or G. Symbols for the amino acids are shown below.

| Single Letter Symbol | Three Letter Symbol | Amino Acids |
|---|---|---|
| A | Ala | Alanine |
| C | Cys | Cysteine |
| D | Asp | Aspartic Acid |
| E | Glu | Glutamic Acid |
| F | Phe | Phenylalanine |
| G | Gly | Glycine |
| H | His | Histidine |
| I | Ile | Isoleucine |
| K | Lys | Lysine |
| L | Leu | Leucine |
| M | Met | Methionine |
| N | Asn | Asparagine |
| P | Pro | Proline |
| Q | Gln | Glutamine |
| R | Arg | Arginine |
| S | Ser | Serine |
| T | Thr | Threonine |
| V | Val | Valine |
| W | Trp | Tryptophan |
| Y | Tyr | Tyrosine |

IV.B. Stimulation of CTL and HTL Responses

[0092] The mechanism by which T cells recognize antigens has been delineated during the past ten years. Based on our understanding of the immune system we have developed efficacious peptide epitope vaccine compositions that can induce a therapeutic or prophylactic immune response to HIV in a broad population. For an understanding of the value and efficacy of the claimed compositions, a brief review of immunology-related technology is provided.

[0093] A complex of an HLA molecule and a peptidic antigen acts as the ligand recognized by HLA-restricted T cells (Buus, S. et al., Cell 47:1071, 1986; Babbitt, B. P. et al., Nature 317:359, 1985; Townsend, A. and Bodmer, H., Annu. Rev. Immunol. 7:601, 1989; Germain, R. N., Annu. Rev. Immunol. 11:403, 1993). Through the study of single amino acid substituted antigen analogs and the sequencing of endogenously bound, naturally processed peptides, critical residues that correspond to motifs required for specific binding to HLA antigen molecules have been identified and are described herein and are set forth in Tables I, II, and III (see also, e.g., Southwood, et al., J. Immunol. 160:3363, 1998; Rammensee, et al., Immunogenetics 41:178, 1995; Rammensee et al., SYFPEITHI, access via web at : http:H/134.2.96.221/scripts.hlaserver.dll/home.htm; Sette, A. and Sidney, J. Curr. Opin. Immunol. 10:478, 1998; Engelhard, V. H., Curr. Opin. Immunol. 6:13, 1994; Sette, A. and Grey, H. M., Curr. Opin. Immunol. 4:79, 1992; Sinigaglia, F. and Hammer, J. Curr. Biol. 6:52, 1994; Ruppert et al., Cell 74:929-937, 1993; Kondo et al., J. Immunol. 155:4307-4312, 1995; Sidney et al., J. Immunol. 157:3480-3490, 1996; Sidney et al., Human Immunol. 45:79-93, 1996; Sette, A. and Sidney, J. Immunogenetics, in press, 1999).

[0094] Furthermore, x-ray crystallographic analysis of HLA-peptide complexes has revealed pockets within the peptide binding cleft of HLA molecules which accommodate, in an allele-specific mode, residues borne by peptide ligands; these residues in turn determine the HLA binding capacity of the peptides in which they are present. (See, e.g., Madden, D. R. Annu. Rev. Immunol. 13:587, 1995; Smith, et al., Immunity 4:203, 1996; Fremont et al., Immunity 8:305, 1998; Stem et al., Structure 2:245, 1994; Jones, E. Y. Curr. Opin. Immunol. 9:75, 1997; Brown, J. H. et al., Nature 364:33, 1993; Guo, H. C. et al., Proc. Natl. Acad. Sci. USA 90:8053, 1993; Guo, H. C. et al., Nature 360:364, 1992; Silver, M. L. et al., Nature 360:367, 1992; Matsumura, M. et al., Science 257:927, 1992; Madden et al., Cell 70:1035, 1992; Fremont, D. H. et al., Science 257:919, 1992; Saper, M. A., Bjorkman, P. J. and Wiley, D. C., J. Mol. Biol. 219:277, 1991.) Accordingly, the definition of class I and class II allele-specific HLA binding motifs, or class I or class II supermotifs allows identification of regions within a protein that have the potential of binding particular HLA antigen(s).

[0095] The present inventors have found that the correlation of binding affinity with immunogenicity, which is disclosed herein, is an important factor to be considered when evaluating candidate peptides. Thus, by a combination of motif searches and HLA-peptide binding assays, candidates for epitope-based vaccines have been identified. After determining their binding affinity, additional confirmatory work can be performed to select, amongst these vaccine candidates, epitopes with preferred characteristics in terms of population coverage, antigenicity, and immunogenicity.

[0096] Various strategies can be utilized to evaluate immunogenicity, including:
[0097] 1) Evaluation of primary T cell cultures from normal individuals (see, e.g., Wentworth, P. A. et al., Mol. Immunol. 32:603, 1995; Celis, E. et al., Proc. Natl. Acad. Sci. USA 91:2105, 1994; Tsai, V. et al., J. Immunol. 158:1796, 1997; Kawashima, I. et al., Human Immunol. 59:1, 1998); This procedure involves the stimulation of peripheral blood lymphocytes (PBL) from normal subjects with a test peptide in the presence of antigen presenting cells in vitro over a period of several weeks. T cells specific for the peptide become activated during this time and are detected using, e.g., a ⁵¹Cr-release assay involving peptide sensitized target cells.

[0098] 2) Immunization of HLA transgenic mice (see, e.g., Wentworth, P. A. et al., J. Immunol. 26:97, 1996; Wentworth, P. A. et al., Int. Immunol. 8:651, 1996; Alexander, J. et al., J. Immunol. 159:4753, 1997); In this method, peptides in incomplete Freund's adjuvant are administered subcutaneously to HLA transgenic mice. Several weeks following immunization, splenocytes are removed and cultured in vitro in the presence of test peptide for approximately one week. Peptide-specific T cells are detected using, e.g., a ⁵¹Cr-release assay involving peptide sensitized target cells and target cells expressing endogenously generated antigen.

[0099] 3) Demonstration of recall T cell responses from immune individuals who have effectively been vaccinated, recovered from infection, and/or from chronically infected patients (see, e.g., Rehermann, B. et al., J. Exp. Med. 181:1047, 1995; Doolan, D. L. et al., Immunity 7:97, 1997; Bertoni, R. et al., J. Clin. Invest. 100:503, 1997; Threlkeld, S. C. et al., J. Immunol. 159:1648, 1997; Diepolder, H. M. et al., J. Virol. 71:6011, 1997); In applying this strategy, recall responses are detected by culturing PBL from subjects that have been naturally exposed to the antigen, for instance through infection, and thus have generated an immune response “naturally”, or from patients who were vaccinated against the infection. PBL from subjects are cultured in vitro for 1-2 weeks in the presence of test peptide plus antigen presenting cells (APC) to allow activation of “memory” T cells, as compared to “naive” T cells. At the end of the culture period, T cell activity is detected using assays for T cell activity including ⁵¹ Cr release involving peptide-sensitized targets, T cell proliferation, or lymphokine release.

[0100] The following describes the peptide epitopes and corresponding nucleic acids of the invention.

IV.C. Binding Affinity of Peptide Epitopes for HLA Molecules

[0101] As indicated herein, the large degree of HLA polymorphism is an important factor to be taken into account with the epitope-based approach to vaccine development. To address this factor, epitope selection encompassing identification of peptides capable of binding at high or intermediate affinity to multiple HLA molecules is preferably utilized, most preferably these epitopes bind at high or intermediate affinity to two or more allele-specific HLA molecules.

[0102] CTL-inducing peptides of interest for vaccine compositions preferably include those that have an IC₅₀ or binding affinity value for class I HLA molecules of 500 nM or better (i.e., the value is <500 nM). HTL-inducing peptides preferably include those that have an IC₅₀ or binding affinity value for class II HLA molecules of 1000 nM or better, (i.e., the value is ≦1,000 nM). For example, peptide binding is assessed by testing the capacity of a candidate peptide to bind to a purified HLA molecule in vitro. Peptides exhibiting high or intermediate affinity are then considered for further analysis. Selected peptides are tested on other members of the supertype family. In preferred embodiments, peptides that exhibit cross-reactive binding are then used in cellular screening analyses or vaccines.

[0103] As disclosed herein, higher HLA binding affinity is correlated with greater immunogenicity. Greater immunogenicity can be manifested in several different ways. Immunogenicity corresponds to whether an immune response is elicited at all, and to the vigor of any particular response, as well as to the extent of a population in which a response is elicited. For example, a peptide might elicit an immune response in a diverse array of the population, yet in no instance produce a vigorous response. In accordance with these principles, close to 90% of high binding peptides have been found to be immunogenic, as contrasted with about 50% of the peptides which bind with intermediate affinity. Moreover, higher binding affinity peptides lead to more vigorous immunogenic responses. As a result, less peptide is required to elicit a similar biological effect if a high affinity binding peptide is used. Thus, in preferred embodiments of the invention, high affinity binding epitopes are particularly useful.

[0104] The relationship between binding affinity for HLA class I molecules and immunogenicity of discrete peptide epitopes on bound antigens has been determined for the first time in the art by the present inventors. The correlation between binding affinity and immunogenicity was analyzed in two different experimental approaches (see, e.g., Sette, et al., J. Immunol. 153:5586-5592, 1994). In the first approach, the immunogenicity of potential epitopes ranging in HLA binding affinity over a 10,000-fold range was analyzed in HLA-A*0201 transgenic mice. In the second approach, the antigenicity of approximately 100 different hepatitis B virus (HBV)-derived potential epitopes, all carrying A*0201 binding motifs, was assessed by using PBL from acute hepatitis patients. Pursuant to these approaches, it was determined that an affinity threshold value of approximately 500 nM (preferably 50 rM or less) determines the capacity of a peptide epitope to elicit a CTL response. These data are true for class I binding affinity measurements for naturally processed peptides and for synthesized T cell epitopes. These data also indicate the important role of determinant selection in the shaping of T cell responses (see, e.g., Schaeffer et al. Proc. Natl. Acad. Sci. USA 86:4649-4653, 1989).

[0105] An affinity threshold associated with immunogenicity in the context of HLA class II DR molecules has also been delineated (see, e.g., Southwood et al. J. Immunology 160:3363-3373,1998, and co-pending U.S. Ser. No. 09/009,953 filed Jan. 21, 1998). In order to define a biologically significant threshold of DR binding affinity, a database of the binding affinities of 32 DR-restricted epitopes for their restricting element (i.e., the HLA molecule that binds the motif) was compiled. In approximately half of the cases (15 of 32 epitopes), DR restriction was associated with high binding affinities, i.e. binding affinity values of 100 nM or less. In the other half of the cases (16 of 32), DR restriction was associated with intermediate affinity (binding affinity values in the 100-1000 nM range). In only one of 32 cases was DR restriction associated with an IC₅₀ of 1000 nM or greater. Thus, 1000 nM can be defined as an affinity threshold associated with immunogenicity in the context of DR molecules.

[0106] The binding affinity of peptides for HLA molecules can be determined as described in Example 1, below.

IV.D. Peptide Epitope Binding Motifs and Supermotifs

[0107] Through the study of single amino acid substituted antigen analogs and the sequencing of endogenously bound, naturally processed peptides, critical residues required for allele-specific binding to HLA molecules have been identified. The presence of these residues correlates with binding affinity for HLA molecules. The identification of motifs and/or supermotifs that correlate with high and intermediate affinity binding is an important issue with respect to the identification of immunogenic peptide epitopes for the inclusion in a vaccine. Kast et al. (J. Immunol. 152:3904-3912, 1994) have shown that motif-bearing peptides account for 90% of the epitopes that bind to allele-specific HLA class I molecules. In this study all possible peptides of 9 amino acids in length and overlapping by eight amino acids (240 peptides), which cover the entire sequence of the E6 and E7 proteins of human papillomavirus type 16, were evaluated for binding to five allele-specific HLA molecules that are expressed at high frequency among different ethnic groups. This unbiased set of peptides allowed an evaluation of the predictive value of HLA class I motifs. From the set of 240 peptides, 22 peptides were identified that bound to an allele-specific HLA molecule with high or intermediate affinity. Of these 22 peptides, 20 (i.e. 91%) were motif-bearing. Thus, this study demonstrates the value of motifs for the identification of peptide epitopes for inclusion in a vaccine: application of motif-based identification techniques will identify about 90% of the potential epitopes in a target antigen protein sequence.

[0108] Such peptide epitopes are identified in the Tables described below. Peptides of the present invention may also comprise epitopes that bind to MHC class II DR molecules. A greater degree of heterogeneity in both size and binding frame position of the motif, relative to the N and C termini of the peptide, exists for class II peptide ligands. This increased heterogeneity of HLA class II peptide ligands is due to the structure of the binding groove of the HLA class II molecule which, unlike its class I counterpart, is open at both ends. Crystallographic analysis of HLA class II DRB*0101-peptide complexes showed that the major energy of binding is contributed by peptide residues complexed with complementary pockets on the DRB*0101 molecules. An important anchor residue engages the deepest hydrophobic pocket (see, e.g., Madden, D. R. Ann. Rev. Immunol. 13:587, 1995) and is referred to as position 1 (P1). P1 may represent the N-terminal residue of a class II binding peptide epitope, but more typically is flanked towards the N-terminus by one or more residues. Other studies have also pointed to an important role for the peptide residue in the 6^{th} position towards the C-terminus, relative to PI, for binding to various DR molecules.

[0109] In the past few years evidence has accumulated to demonstrate that a large fraction of HLA class I and class II molecules can be classified into a relatively few supertypes, each characterized by largely overlapping peptide binding repertoires, and consensus structures of the main peptide binding pockets. Thus, peptides of the present invention are identified by any one of several HLA-specific amino acid motifs (see, e.g., Tables I-III), or if the presence of the motif corresponds to the ability to bind several allele-specific HLA antigens, a supermotif The HLA molecules that bind to peptides that possess a particular amino acid supermotif are collectively referred to as an HLA “supertype.”

[0110] The peptide motifs and supermotifs described below, and summarized in Tables I-III, provide guidance for the identification and use of peptide epitopes in accordance with the invention.

[0111] Examples of peptide epitopes bearing a respective supermotif or motif are included in Tables as designated in the description of each motif or supermotif below. The Tables include a binding affinity ratio listing for some of the peptide epitopes. The ratio may be converted to IC₅₀ by using the following formula: IC₅₀ of the standard peptide/ratio=IC₅₀ of the test peptide (i.e., the peptide epitope). The IC₅₀ values of standard peptides used to determine binding affinities for Class I peptides are shown in Table IV. The IC₅₀ values of standard peptides used to determine binding affinities for Class II peptides are shown in Table V. The peptides used as standards for the binding assays described herein are examples of standards; alternative standard peptides can also be used when performing binding studies.

[0112] To obtain the peptide epitope sequences listed in each Table, protein sequence data for all of the HIV-1 isolates present in the 1999 Los Alamos database (http://hiv-web.lanl.gov) were evaluated for the presence of the designated supermotif or motif. A listing of the strains is provided in Table XXVI. Nine HIV-1 structural and regulatory proteins, gag, pol, env, nef, rev, tat, vif, vpr, and vpu, were included in the analysis. Peptide epitopes were additionally evaluated on the basis of their conservancy (i.e., the amount of variance) among the available protein sequences for each HIV antigen. A criterion for conservancy used to generate the peptides set out in Tables VII-XX requires that the entire sequence of an HLA class I binding peptide be totally conserved in 15% of the sequences available for a specific HIV antigen. Similarly, a criterion for conservancy requires that the entire 9-mer core region of an HLA class II binding peptide be totally conserved in 15% of the sequences available for a specific protein. The percent conservancy of the selected peptide epitopes is indicated on the Tables. The frequency, i.e. the number of sequences of the HIV protein antigen in which the totally conserved peptide sequence was identified, is also shown. The “pos” (position) column in the Tables designates the amino acid position in the HIV protein that corresponds to the first amino acid residue of the epitope. The “number of amino acids” indicates the number of residues in the epitope sequence.

HLA Class I Motifs Indicative of CTL Inducing Peptide Epitopes:

[0113] The primary anchor residues of the HLA class I peptide epitope supermotifs and motifs delineated below are summarized in Table I. The HLA class I motifs set out in Table I(a) are those most particularly relevant to the invention claimed here. Primary and secondary anchor positions are summarized in Table II. Allele-specific HLA molecules that comprise HLA class I supertype families are listed in Table VI. In some cases, peptide epitopes may be listed in both a motif and a supermotif Table. The relationship of a particular motif and respective supermotif is indicated in the description of the individual motifs.

IV.D.1. HLA-A1 supermotif

[0114] The HLA-A1 supermotif is characterized by the presence in peptide ligands of a small (T or S) or hydrophobic (L, I, V, or M) primary anchor residue in position 2, and an aromatic (Y, F, or W) primary anchor residue at the C-terminal position of the epitope. The corresponding family of HLA molecules that bind to the A1 supermotif (i.e., the HLA-A1 supertype) is comprised of at least A*0101, A*2601, A*2602, A*2501, and A*3201 (see, e.g., DiBrino, M. et al., J. Immunol. 151:5930, 1993; DiBrino, M. et al., J. Immunol. 152:620, 1994; Kondo, A. et al., Immunogenetics 45:249, 1997). Other allele-specific HLA molecules predicted to be members of the A1 superfamily are shown in Table VI. Peptides binding to each of the individual HLA proteins can be modulated by substitutions at primary and/or secondary anchor positions, preferably choosing respective residues specified for the supermotif.

[0115] Representative peptide epitopes that comprise the A1 supermotif are set forth on the attached Table VII.

IV.D.2. HLA-A2 Supermotif

[0116] Primary anchor specificities for allele-specific HLA-A2.1 molecules (see, e.g., Falk et al., Nature 351:290-296, 1991; Hunt et al., Science 255:1261-1263, 1992; Parker et al., J. Immunol. 149:3580-3587, 1992; Ruppert et al., Cell 74:929-937, 1993) and cross-reactive binding among HLA-A2 and -A28 molecules have been described. (See, e.g., Fruci et al., Human Immunol. 38:187-192, 1993; Tanigaki et al., Human Immunol. 39:155-162, 1994; Del Guercio et al., J. Immunol. 154:685-693, 1995; Kast et al., J. Immunol. 152:3904-3912, 1994 for reviews of relevant data.) These primary anchor residues define the HLA-A2 supermotif; which presence in peptide ligands corresponds to the ability to bind several different HLA-A2 and -A28 molecules. The HLA-A2 supermotif comprises peptide ligands with L, I, V, M, A, T, or Q as a primary anchor residue at position 2 and L, I, V, M, A, or T as a primary anchor residue at the C-terminal position of the epitope.

[0117] The corresponding family of HLA molecules (i.e., the HLA-A2 supertype that binds these peptides) is comprised of at least: A*0201, A*0202, A*0203, A*0204, A*0205, A*0206, A*0207, A*0209, A*0214, A*6802, and A*6901. Other allele-specific HLA molecules predicted to be members of the A2 superfamily are shown in Table VI. As explained in detail below, binding to each of the individual allele-specific HLA molecules can be modulated by substitutions at the primary anchor and/or secondary anchor positions, preferably choosing respective residues specified for the supermotif.

[0118] Representative peptide epitopes that comprise an A2 supermotif are set forth on the attached Table VIII. The motifs comprising the primary anchor residues V, A, T, or Q at position 2 and L, I, V, A, or T at the C-terminal position are those most particularly relevant to the invention claimed herein.

IV.D.3. HLA-A3 Supermotif

[0119] The HLA-A3 supermotif is characterized by the presence in peptide ligands of A, L, I, V, M, S, or, T as a primary anchor at position 2, and a positively charged residue, R or K, at the C-terminal position of the epitope, e.g., in position 9 of 9-mers (see, e.g., Sidney et al., Hum. Immunol. 45:79, 1996). Exemplary members of the corresponding family of HLA molecules (the HLA-A3 supertype) that bind the A3 supermotif include at least A*0301, A*1101, A*3101, A*3301, and A*6801. Other allele-specific HLA molecules predicted to be members of the A3 supertype are shown in Table VI. As explained in detail below, peptide binding to each of the individual allele-specific HLA proteins can be modulated by substitutions of amino acids at the primary and/or secondary anchor positions of the peptide, preferably choosing respective residues specified for the supermotif.

[0120] Representative peptide epitopes that comprise the A3 supermotif are set forth on the attached Table IX.

IV.D.4. HLA-A24 Supermotif

[0121] The HLA-A24 supermotif is characterized by the presence in peptide ligands of an aromatic (F, W, or Y) or hydrophobic aliphatic (L, I, V, M, or T) residue as a primary anchor in position 2, and Y, F, W, L, I, or M as primary anchor at the C-terminal position of the epitope (see, e.g., Sette and Sidney, Immunogenetics, in press, 1999). The corresponding family of HLA molecules that bind to the A24 supermotif (i.e., the A24 supertype) includes at least A*2402, A*3001, and A*2301. Other allele-specific HLA molecules predicted to be members of the A24 supertype are shown in Table VI. Peptide binding to each of the allele-specific HLA molecules can be modulated by substitutions at primary and/or secondary anchor positions, preferably choosing respective residues specified for the supermotif.

[0122] Representative peptide epitopes that comprise the A24 supermotif are set forth on the attached Table X.

IV.D.5. HLA-B7 Supermotif

[0123] The HLA-B7 supermotif is characterized by peptides bearing proline in position 2 as a primary anchor, and a hydrophobic or aliphatic amino acid (L, I, V, M, A, F, W, or Y) as the primary anchor at the C-terminal position of the epitope. The corresponding family of HLA molecules that bind the B7 supermotif (i.e., the HLA-B7 supertype) is comprised of at least twenty six HLA-B proteins including: B*0702, B*0703, B*0704, B*0705, B*1508, B*3501, B*3502, B*3503, B*3504, B*3505, B*3506, B*3507, B*3508, B*5101, B*5102, B*5103, B*5104, B*5105, B*5301, B*5401, B*5501, B*5502, B*5601, B*5602, B*6701, and B*7801 (see, e.g., Sidney, et al., J. Immunol. 154:247, 1995; Barber, et al., Curr. Biol. 5:179, 1995; Hill, et al., Nature 360:434, 1992; Rammensee, et al., Immunogenetics 41:178, 1995 for reviews of relevant data). Other allele-specific HLA molecules predicted to be members of the B7 supertype are shown in Table VI. As explained in detail below, peptide binding to each of the individual allele-specific HLA proteins can be modulated by substitutions at the primary and/or secondary anchor positions of the peptide, preferably choosing respective residues specified for the supermotif.

[0124] Representative peptide epitopes that comprise the B7 supermotif are set forth on the attached Table XI.

IV.D.6. HLA-B27 Supermotif

[0125] The HLA-B27 supermotif is characterized by the presence in peptide ligands of a positively charged (R, H, or K) residue as a primary anchor at position 2, and a hydrophobic (F, Y, L, W, M, I, A, or V) residue as a primary anchor at the C-terminal position of the epitope (see, e.g., Sidney and Sette, Immunogenetics, in press, 1999). Exemplary members of the corresponding family of HLA molecules that bind to the B27 supermotif (i.e., the B27 supertype) include at least B*1401, B*1402, B*1509, B*2702, B*2703, B*2704, B*2705, B*2706, B*3801, B*3901, B*3902, and B*7301. Other allele-specific HLA molecules predicted to be members of the B27 supertype are shown in Table VI. Peptide binding to each of the allele-specific HLA molecules can be modulated by substitutions at primary and/or secondary anchor positions, preferably choosing respective residues specified for the supermotif.

[0126] Representative peptide epitopes that comprise the B27 supermotif are set forth on the attached Table XII.

IV.D.7. HLA-B44 Supermotif

[0127] The HLA-B44 supermotif is characterized by the presence in peptide ligands of negatively charged (D or E) residues as a primary anchor in position 2, and hydrophobic residues (F, W, Y, L, I, M, V, or A) as a primary anchor at the C-terminal position of the epitope (see, e.g., Sidney et al., Immunol. Today 17:261, 1996). Exemplary members of the corresponding family of HLA molecules that bind to the B44 supermotif (i.e., the B44 supertype) include at least: B*1801, B*1802, B*3701, B*4001, B*4002, B*4006, B*4402, B*4403, and B*4006. Peptide binding to each of the allele-specific HLA molecules can be modulated by substitutions at primary and/or secondary anchor positions; preferably choosing respective residues specified for the supermotif

IV.D.8. HLA-B58 Supermotif

[0128] The HLA-B58 supermotif is characterized by the presence in peptide ligands of a small aliphatic residue (A, S, or T) as a primary anchor residue at position 2, and an aromatic or hydrophobic residue (F, W, Y, L, I, V, M, or A) as a primary anchor residue at the C-terminal position of the epitope (see, e.g., Sidney and Sette, Immunogenetics, in press, 1999 for reviews of relevant data). Exemplary members of the corresponding family of HLA molecules that bind to the B58 supermotif (i.e., the B58 supertype) include at least: B*1516, B*1517, B*5701, B*5702, and B*5801. Other allele-specific HLA molecules predicted to be members of the B58 supertype are shown in Table VI. Peptide binding to each of the allele-specific HLA molecules can be modulated by substitutions at primary and/or secondary anchor positions, preferably choosing respective residues specified for the supermotif.

[0129] Representative peptide epitopes that comprise the B58 supermotif are set forth on the attached Table XIII.

IV.D.9. HLA-B62 Supermotif

[0130] The HLA-B62 supermotif is characterized by the presence in peptide ligands of the polar aliphatic residue Q or a hydrophobic aliphatic residue (L, V, M, I, or P) as a primary anchor in position 2, and a hydrophobic residue (F, W, Y, M, I, V, L, or A) as a primary anchor at the C-terminal position of the epitope (see, e.g., Sidney and Sette, Immunogenetics, in press, 1999). Exemplary members of the corresponding family of HLA molecules that bind to the B62 supermotif (i.e., the B62 supertype) include at least: B*1501, B*1502, B*1513, and B5201. Other allele-specific HLA molecules predicted to be members of the B62 supertype are shown in Table VI. Peptide binding to each of the allele-specific HLA molecules can be modulated by substitutions at primary and/or secondary anchor positions, preferably choosing respective residues specified for the supermotif.

[0131] Representative peptide epitopes that comprise the B62 supermotif are set forth on the attached Table XIV.

IV.D.10. HLA-A1 Motif

[0132] The HLA-A1 motif is characterized by the presence in peptide ligands of T, S, or M as a primary anchor residue at position 2 and the presence of Y as a primary anchor residue at the C-terminal position of the epitope. An alternative allele-specific A1 motif is characterized by a primary anchor residue at position 3 rather than position 2. This motif is characterized by the presence of D, E, A, or S as a primary anchor residue in position 3, and a Y as a primary anchor residue at the C-terminal position of the epitope (see, e.g., DiBrino et al., J. Immunol., 152:620, 1994; Kondo et al., Immunogenetics 45:249, 1997; and Kubo et al., J. Immunol. 152:3913, 1994 for reviews of relevant data). Peptide binding to HLA A1 can be modulated by substitutions at primary and/or secondary anchor positions, preferably choosing respective residues specified for the motif.

[0133] Representative peptide epitopes that comprise either A1 motif are set forth on the attached Table XV. Those epitopes comprising T, S, or M at position 2 and Y at the C-terminal position are also included in the listing of HLA-A1 supermotif-bearing peptide epitopes listed in Table VII, as these residues are a subset of the A1 supermotif primary anchors.

IV.D.11. HLA-A*0201 Motif

[0134] An HLA-A2*0201 motif was determined to be characterized by the presence in peptide ligands of L or M as a primary anchor residue in position 2, and L or V as a primary anchor residue at the C-terminal position of a 9-residue peptide (see, e.g. Falk et al., Nature 351:290-296, 1991) and was further found to comprise an I at position 2 and I or A at the C-terminal position of a nine amino acid peptide (see, e.g., Hunt et al., Science 255:1261-1263, Mar. 6, 1992; Parker et al., J. Immunol. 149:3580-3587, 1992). The A*0201 allele-specific motif has also been defined by the present inventors to additionally comprise V, A, T, or Q as a primary anchor residue at position 2, and M or T as a primary anchor residue at the C-terminal position of the epitope (see, e.g., Kast et al., J. Immunol. 152:3904-3912, 1994). Thus, the HLA-A*0201 motif comprises peptide ligands with L, I, V, M, A, T, or Q as primary anchor residues at position 2 and L, I, V, M, A, or T as a primary anchor residue at the C-terminal position of the epitope. The preferred and tolerated residues that characterize the primary anchor positions of the HLA-A*0201 motif are identical to the residues describing the A2 supermotif. (For reviews of relevant data, see, e.g., Del Guercio et al., J. Immunol. 154:685-693, 1995; Ruppert et al., Cell 74:929-937, 1993; Sidney et al., Immunol. Today 17:261-266, 1996; Sette and Sidney, Curr. Opin. in Immunol. 10:478-482, 1998). Secondary anchor residues that characterize the A*0201 motif have additionally been defined (see, e.g., Ruppert et al., Cell 74:929-937, 1993). These are shown in Table II. Peptide binding to HLA-A*0201 molecules can be modulated by substitutions at primary and/or secondary anchor positions, preferably choosing respective residues specified for the motif.

[0135] Representative peptide epitopes that comprise an A*0201 motif are set forth on the attached Table VIII. The A*0201 motifs comprising the primary anchor residues V, A, T, or Q at position 2 and L, I, V, A, or T at the C-terminal position are those most particularly relevant to the invention claimed herein.

IV.D.12. HLA-A3 Motif

[0136] The HLA-A3 motif is characterized by the presence in peptide ligands of L, M, V, I, S, A, T, F, C, G, or D as a primary anchor residue at position 2, and the presence of K, Y, R, H, F, or A as a primary anchor residue at the C-terminal position of the epitope (see, e.g., DiBrino et al., Proc. Natl. Acad. Sci USA 90:1508, 1993; and Kubo et al., J. Immunol. 152:3913-3924, 1994). Peptide binding to HLA-A3 can be modulated by substitutions at primary and/or secondary anchor positions, preferably choosing respective residues specified for the motif.

[0137] Representative peptide epitopes that comprise the A3 motif are set forth on the attached Table XVI. Those peptide epitopes that also comprise the A3 supermotif are also listed in Table IX. The A3 supermotif primary anchor residues comprise a subset of the A3- and A11-allele specific motif primary anchor residues.

IV.D.13. HLA-A11 Motif

[0138] The HLA-A 11 motif is characterized by the presence in peptide ligands of V, T, M, L, I, S, A, G, N, C, D, or F as a primary anchor residue in position 2, and K, R, Y, or H as a primary anchor residue at the C-terminal position of the epitope (see, e.g., Zhang et al., Proc. Natl. Acad. Sci USA 90:2217-2221, 1993; and Kubo et al., J. Immunol. 152:3913-3924, 1994). Peptide binding to HLA-A11 can be modulated by substitutions at primary and/or secondary anchor positions, preferably choosing respective residues specified for the motif.

[0139] Representative peptide epitopes that comprise the A11 motif are set forth on the attached Table XVII; peptide epitopes comprising the A3 allele-specific motif are also present in this Table because of the extensive overlap between the A3 and A11 motif primary anchor specificities. Further, those peptide epitopes that comprise the A3 supermotif are also listed in Table IX.

IV.D.14. HLA-A24 Motif

[0140] The HLA-A24 motif is characterized by the presence in peptide ligands of Y, F, W, or M as a primary anchor residue in position 2, and F, L, I, or W as a primary anchor residue at the C-terminal position of the epitope (see, e.g., Kondo et al., J. Immunol. 155:4307-4312, 1995; and Kubo et al., J. Immunol. 152:3913-3924, 1994). Peptide binding to HLA-A24 molecules can be modulated by substitutions at primary and/or secondary anchor positions; preferably choosing respective residues specified for the motif.

[0141] Representative peptide epitopes that comprise the A24 motif are set forth on the attached Table XVIII. These epitopes are also listed in Table X, which sets forth HLA-A24-supermotif-bearing peptide epitopes, as the primary anchor residues characterizing the A24 allele-specific motif comprise a subset of the A24 supermotif primary anchor residues.

Motifs Indicative of Class II HTL Inducing Peptide Epitopes

[0142] The primary and secondary anchor residues of the HLA class II peptide epitope supermotifs and motifs delineated below are summarized in Table III.

IV.D.15. HLA DR-14-7 Supermotif

[0143] Motifs have also been identified for peptides that bind to three common HLA class II allele-specific HLA molecules: HLA DRB1*0401, DRB1*0101, and DRB1*0701 (see, e.g., the review by Southwood et al. J. Immunology 160:3363-3373,1998). Collectively, the common residues from these motifs delineate the HLA DR-1-4-7 supermotif. Peptides that bind to these DR molecules carry a supermotif characterized by a large aromatic or hydrophobic residue (Y, F, W, L, I, V, or M) as a primary anchor residue in position 1, and a small, non-charged residue (S, T, C, A, P, V, I, L, or M) as a primary anchor residue in position 6 of a 9-mer core region. Allele-specific secondary effects and secondary anchors for each of these HLA types have also been identified (Southwood et al., supra). These are set forth in Table III. Peptide binding to HLA-DRB1*0401, DRB1*0101, and/or DRB1*0701 can be modulated by substitutions at primary and/or secondary anchor positions, preferably choosing respective residues specified for the supermotif.

[0144] Conserved 9-mer core regions (i.e., sequences that are 100% conserved in at least 15% of the HIV antigen protein sequences used for the analysis), comprising the DR-1-4-7 supermotif, wherein position 1 of the supermotif is at position 1 of the nine-residue core, are set forth in Table XLXa. Respective exemplary peptide epitopes of 15 amino acid residues in length, each of which comprise a conserved nine residue core, are also shown in section “a” of the Table. Cross-reactive binding data for exemplary 15-residue supermotif-bearing peptides are shown in Table XIXb.

IV.D.16. HLA DR3 Motifs

[0145] Two alternative motifs (i.e., submotifs) characterize peptide epitopes that bind to HLA-DR3 molecules (see, e.g., Geluk et al., J. Immunol. 152:5742, 1994). In the first motif (submotif DR3A) a large, hydrophobic residue (L, I, V, M, F, or Y) is present in anchor position I of a 9-mer core, and D is present as an anchor at position 4, towards the carboxyl terminus of the epitope. As in other class II motifs, core position I may or may not occupy the peptide N-terminal position.

[0146] The alternative DR3 submotif provides for lack of the large, hydrophobic residue at anchor position 1, and/or lack of the negatively charged or amide-like anchor residue at position 4, by the presence of a positive charge at position 6 towards the carboxyl terminus of the epitope. Thus, for the alternative allele-specific DR3 motif (submotif DR3B): L, I, V, M, F, Y, A, or Y is present at anchor position 1; D, N, Q, E, S, or T is present at anchor position 4; and K, R, or H is present at anchor position 6. Peptide binding to HLA-DR3 can be modulated by substitutions at primary and/or secondary anchor positions, preferably choosing respective residues specified for the motif.

[0147] Conserved 9-mer core regions (i.e., those sequences that are 100% conserved in at least 15% of the HIV antigen protein sequences used for the analysis) corresponding to a nine residue sequence comprising the DR3A submotif (wherein position I of the motif is at position 1 of the nine residue core) are set forth in Table XXa. Respective exemplary peptide epitopes of 15 amino acid residues in length, each of which comprise a conserved nine residue core, are also shown in Table XXa. Table XXb shows binding data of exemplary DR3 submotif A-bearing peptides.

[0148] Conserved 9-mer core regions (i.e., those that are 100% conserved in at least 15% of the HIV antigen protein sequences used for the analysis) comprising the DR3B submotif and respective exemplary 15-mer peptides comprising the DR3 submotif-B epitope are set forth in Table XXc. Table XXd shows binding data of exemplary DR3 submotif B-bearing peptides.

[0149] Each of the HLA class I or class II peptide epitopes set out in the Tables herein are deemed singly to be an inventive aspect of this application. Further, it is also an inventive aspect of this application that each peptide epitope may be used in combination with any other peptide epitope.

IV.E. Enhancing Population Coverage of the Vaccine

[0150] Vaccines that have broad population coverage are preferred because they are more commercially viable and generally applicable to the most people. Broad population coverage can be obtained using the peptides of the invention (and nucleic acid compositions that encode such peptides) through selecting peptide epitopes that bind to HLA alleles which, when considered in total, are present in most of the population. Table XXI lists the overall frequencies of the HLA class I supertypes in various ethnicities (Table XXIa) and the combined population coverage achieved by the A2-, A3-, and B7-supertypes (Table XXIB). The A2-, A3-, and B7 supertypes are each present on the average of over 40% in each of these five major ethnic groups. Coverage in excess of 80% is achieved with a combination of these supermotifs. These results suggest that effective and non-ethnically biased population coverage is achieved upon use of a limited number of cross-reactive peptides. Although the population coverage reached with these three main peptide specificities is high, coverage can be expanded to reach 95% population coverage and above, and more easily achieve truly multispecific responses upon use of additional supermotif or allele-specific motif bearing peptides.

[0151] The B44-, A1-, and A24-supertypes are each present, on average, in a range from 25% to 40% in these major ethnic populations (Table XXIa). While less prevalent overall, the B27-, B58-, and B62 supertypes are each present with a frequency >25% in at least one major ethnic group (Table XXIa). Table XXIB summarizes the estimated prevalence of combinations of HLA supertypes that have been identified in five major ethnic groups. The incremental coverage obtained by the inclusion of A1, A24-, and B44-supertypes to the A2, A3, and B7 coverage and coverage obtained with all of the supertypes described herein, is shown.

[0152] The data presented herein, together with the previous definition of the A2-, A3-, and B7-supertypes, indicates that all antigens, with the possible exception of A29, B8, and B46, can be classified into a total of nine HLA supertypes. By including epitopes from the six most frequent supertypes, an average population coverage of 99% is obtained for five major ethnic groups.

IV.F. Immune Response-Stimulating Peptide Analogs

[0153] In general, CTL and HTL responses are not directed against all possible epitopes. Rather, they are restricted to a few “immunodominant” determinants (Zinkemagel, et al., Adv. Immunol. 27:5159, 1979; Bennink, et al., J. Exp. Med. 168:19351939, 1988; Rawle, et al., J. Immunol. 146:3977-3984, 1991). It has been recognized that immunodominance (Benacerraf, et al., Science 175:273-279, 1972) could be explained by either the ability of a given epitope to selectively bind a particular HILA protein (determinant selection theory) (Vitiello, et al., J. Immunol. 131:1635, 1983); Rosenthal, et al., Nature 267:156-158, 1977), or to be selectively recognized by the existing TCR (T cell receptor) specificities (repertoire theory) (Klein, J., IMMUNOLOGY, THE SCIENCE OF SELFNONSELF DISCRIMINATION, John Wiley & Sons, New York, pp. 270-310, 1982). It has been demonstrated that additional factors, mostly linked to processing events, can also play a key role in dictating, beyond strict immunogenicity, which of the many potential determinants will be presented as immunodominant (Sercarz, et al., Annu. Rev. Immunol. 11:729-766, 1993).

[0154] The concept of dominance and subdominance is relevant to immunotherapy of both infectious diseases and cancer. For example, in the course of chronic viral disease, recruitment of subdominant epitopes can be important for successful clearance of the infection, especially if dominant CTL or HTL specificities have been inactivated by functional tolerance, suppression, mutation of viruses and other mechanisms (Franco, et al., Curr. Opin. Immunol. 7:524-531, 1995). In the case of cancer and tumor antigens, CTLs recognizing at least some of the highest binding affinity peptides might be functionally inactivated. Lower binding affinity peptides are preferentially recognized at these times, and may therefore be preferred in therapeutic or prophylactic anti-cancer vaccines.

[0155] In particular, it has been noted that a significant number of epitopes derived from known non-viral tumor associated antigens (TAA) bind HLA class I with intermediate affinity (IC₅₀ in the 50-500 nM range). For example, it has been found that 8 of 15 known TAA peptides recognized by tumor infiltrating lymphocytes (TIL) or CTL bound in the 50-500 nM range. (These data are in contrast with estimates that 90% of known viral antigens were bound by HLA class I molecules with IC₅₀ of 50 nM or less, while only approximately 10% bound in the 50-500 nM range (Sette, et al., J. Immunol., 153:558-5592, 1994). In the cancer setting this phenomenon is probably due to elimination or functional inhibition of the CTL recognizing several of the highest binding peptides, presumably because of T cell tolerization events.

[0156] Without intending to be bound by theory, it is believed that because T cells to dominant epitopes may have been clonally deleted, selecting subdominant epitopes may allow existing T cells to be recruited, which will then lead to a therapeutic or prophylactic response. However, the binding of HLA molecules to subdominant epitopes is often less vigorous than to dominant ones. Accordingly, there is a need to be able to modulate the binding affinity of particular immunogenic epitopes for one or more HLA molecules, and thereby to modulate the immune response elicited by the peptide, for example to prepare analog peptides which elicit a more vigorous response. This ability would greatly enhance the usefulness of peptide epitope-based vaccines and therapeutic agents.

[0157] Although peptides with suitable cross-reactivity among all alleles of a superfamily are identified by the screening procedures described above, cross-reactivity is not always as complete as possible, and in certain cases procedures to increase cross-reactivity of peptides can be useful; moreover, such procedures can also be used to modify other properties of the peptides such as binding affinity or peptide stability. Having established the general rules that govern cross-reactivity of peptides for HLA alleles within a given motif or supermotif, modification (i.e., analoging) of the structure of peptides of particular interest in order to achieve broader (or otherwise modified) HLA binding capacity can be performed. More specifically, peptides which exhibit the broadest cross-reactivity patterns, can be produced in accordance with the teachings herein. The present concepts related to analog generation are set forth in greater detail in co-pending U.S. Ser. No. 09/226,775 filed Jan. 6, 1999.

[0158] In brief, the strategy employed utilizes the motifs or supermotifs which correlate with binding to certain HLA molecules. The motifs or supermotifs are defined by having primary anchors, and in many cases secondary anchors. Analog peptides can be created by substituting amino acid residues at primary anchor, secondary anchor, or at primary and secondary anchor positions. Generally, analogs are made for peptides that already bear a motif or supermotif. Preferred secondary anchor residues of supermotifs and motifs that have been defined for HLA class I and class II binding peptides are shown in Tables II and III, respectively.

[0159] For a number of the motifs or supermotifs in accordance with the invention, residues are defined which are deleterious to binding to allele-specific HLA molecules or members of HLA supertypes that bind the respective motif or supermotif (Tables II and E). Accordingly, removal of such residues that are detrimental to binding can be performed in accordance with the present invention. For example, in the case of the A3 supertype, when all peptides that have such deleterious residues are removed from the population of peptides used in the analysis, the incidence of cross-reactivity increased from 22% to 37% (see, e.g., Sidney, J. et al., Hu. Immunol. 45:79, 1996). Thus, one strategy to improve the cross-reactivity of peptides within a given supermotif is simply to delete one or more of the deleterious residues present within a peptide and substitute a small “neutral” residue such as Ala (that may not influence T cell recognition of the peptide). An enhanced likelihood of cross-reactivity is expected if, together with elimination of detrimental residues within a peptide, “preferred” residues associated with high affinity binding to an allele-specific HLA molecule or to multiple HLA molecules within a superfamily are inserted.

[0160] To ensure that an analog peptide, when used as a vaccine, actually elicits a CTL response to the native epitope in vivo (or, in the case of class II epitopes, elicits helper T cells that cross-react with the wild type peptides), the analog peptide may be used to immunize T cells in vitro from individuals of the appropriate HLA allele. Thereafter, the immunized cells' capacity to induce lysis of wild type peptide sensitized target cells is evaluated. It will be desirable to use as antigen presenting cells, cells that have been either infected, or transfected with the appropriate genes, or, in the case of class II epitopes only, cells that have been pulsed with whole protein antigens, to establish whether endogenously produced antigen is also recognized by the relevant T cells.

[0161] Another embodiment of the invention is to create analogs of weak binding peptides, to thereby ensure adequate numbers of cross-reactive cellular binders. Class I binding peptides exhibiting binding affinities of 500-5000 nM, and carrying an acceptable but suboptimal primary anchor residue at one or both positions can be “fixed” by substituting preferred anchor residues in accordance with the respective supertype. The analog peptides can then be tested for crossbinding activity.

[0162] Another embodiment for generating effective peptide analogs involves the substitution of residues that have an adverse impact on peptide stability or solubility in, e.g., a liquid environment. This substitution may occur at any position of the peptide epitope. For example, a cysteine (C) can be substituted out in favor of α-amino butyric acid. Due to its chemical nature, cysteine has the propensity to form disulfide bridges and sufficiently alter the peptide structurally so as to reduce binding capacity. Substituting α-amino butyric acid for C not only alleviates this problem, but actually improves binding and crossbinding capability in certain instances (see, e.g., the review by Sette et al., In: Persistent Viral Infections, Eds. R. Ahmed and I. Chen, John Wiley & Sons, England, 1999). Substitution of cysteine with α-amino butyric acid may occur at any residue of a peptide epitope, i.e. at either anchor or non-anchor positions.

IV.G. Computer Screening of Protein Sequences from Disease-Related Antigens for Supermotif- or Motif-Bearing Peptides

[0163] In order to identify supermotif- or motif-bearing epitopes in a target antigen, a native protein sequence, e.g., a tumor-associated antigen, or sequences from an infectious organism, or a donor tissue for transplantation, is screened using a means for computing, such as an intellectual calculation or a computer, to determine the presence of a supermotif or motif within the sequence. The information obtained from the analysis of native peptide can be used directly to evaluate the status of the native peptide or may be utilized subsequently to generate the peptide epitope.

[0164] Computer programs that allow the rapid screening of protein sequences for the occurrence of the subject supermotifs or motifs are encompassed by the present invention; as are programs that permit the generation of analog peptides. These programs are implemented to analyze any identified amino acid sequence or operate on an unknown sequence and simultaneously determine the sequence and identify motif-bearing epitopes thereof; analogs can be simultaneously determined as well. Generally, the identified sequences will be from a pathogenic organism or a tumor-associated peptide. For example, the target molecules considered herein include, without limitation, the gag, pol, env, nef, rev, tat, vif, vpr, and vpu proteins of HIV.

[0165] In cases where the sequence of multiple variants of the same target protein are available, potential peptide epitopes can also be selected on the basis of their conservancy. For example, a criterion for conservancy may define that the entire sequence of an HLA class I binding peptide or the entire 9-mer core of a class II binding peptide, be conserved in a designated percentage, of the sequences evaluated for a specific protein antigen.

[0166] Because HIV rapidly mutates thereby resulting in the generation of virus strains that have divergent amino acid sequences, an alternative method of selecting epitopes for inclusion in a vaccine composition is employed herein. In order to target a broad population that may be infected with a number of different strains, it is preferable to include in vaccine compositions epitopes that are representative of HIV antigen sequences from different HIV strains. For example, by selecting 5 epitopes from the same region, each of which is 20% conserved among HIV strains, the combination of the epitopes achieves 100% coverage of that region. As appreciated y those in the art, lower or higher degress of conservancy, such as the 15% conservancy used for identification of the epitopes set out in Tables VII-XX, can be employed as appropriate for a given antigenic target.

[0167] It is important that the selection criteria utilized for prediction of peptide binding are as accurate as possible, to correlate most efficiently with actual binding. Prediction of peptides that bind, for example, to HLA-A*0201, on the basis of the presence of the appropriate primary anchors, is positive at about a 30% rate (see, e.g., Ruppert, J. et al. Cell 74:929, 1993). However, by extensively analyzing peptide-HLA binding data disclosed herein, data in related patent applications, and data in the art, the present inventors have developed a number of allele-specific polynomial algorithms that dramatically increase the predictive value over identification on the basis of the presence of primary anchor residues alone. These algorithms take into account not only the presence or absence of primary anchors, but also consider the positive or deleterious presence of secondary anchor residues (to account for the impact of different amino acids at different positions). The algorithms are essentially based on the premise that the overall affinity (or ΔG) of peptide-HLA interactions can be approximated as a linear polynomial function of the type:
ΔG=a₁ᵢ×a₂ᵢ×a₃ᵢ . . . ×aₙᵢ
where aⱼᵢ is a coefficient that represents the effect of the presence of a given amino acid (i) at a given position (i) along the sequence of a peptide of n amino acids. An important assumption of this method is that the effects at each position are essentially independent of each other. This assumption is justified by studies that demonstrated that peptides are bound to HLA molecules and recognized by T cells in essentially an extended conformation. Derivation of specific algorithm coefficients has been described, for example, in Gulukota, K. et al., J. Mol. Biol. 267:1258, 1997.

[0168] Additional methods to identify preferred peptide sequences, which also make use of specific motifs, include the use of neural networks and molecular modeling programs (see, e.g., Milik et al., Nature Biotechnology 16:753, 1998; Altuvia et al., Hum. Immunol. 58:1, 1997; Altuvia et al, J. Mol. Biol. 249:244, 1995; Buus, S. Curr. Opin. Immunol. 11:209-213, 1999; Brusic, V. et al., Bioinformatics 14:121-130, 1998; Parker et al., J. Immunol. 152:163, 1993; Meister et al., Vaccine 13:581, 1995; Hammer et al., J. Exp. Med. 180:2353, 1994; Sturniolo et al., Nature Biotechnol. 17:555 1999).

[0169] For example, it has been shown that in sets of A*0201 motif-bearing peptides containing at least one preferred secondary anchor residue while avoiding the presence of any deleterious secondary anchor residues, 69% of the peptides will bind A*0201 with an IC₅₀ less than 500 nM (Ruppert, J. et al. Cell 74:929, 1993). These algorithms are also flexible in that cut-off scores may be adjusted to select sets of peptides with greater or lower predicted binding properties, as desired.

[0170] In utilizing computer screening to identify peptide epitopes, a protein sequence or translated sequence may be analyzed using software developed to search for motifs, for example the “FINDPATTERNS' program (Devereux, et al. Nucl. Acids Res. 12:387-395, 1984) or Motif Search 1.4 software program (D. Brown, San Diego, Calif.) to identify potential peptide sequences containing appropriate HLA binding motifs. The identified peptides can be scored using customized polynomial algorithms to predict their capacity to bind specific HLA class I or class II alleles. As appreciated by one of ordinary skill in the art, a large array of computer programming software and hardware options are available in the relevant art which can be employed to implement the motifs of the invention in order to evaluate (e.g., without limitation, to identify epitopes, identify epitope concentration per peptide length, or to generate analogs) known or unknown peptide sequences.

[0171] In accordance with the procedures described above, HIV peptide epitopes and analogs thereof that are able to bind HLA supertype groups or allele-specific HLA molecules have been identified (Tables VII-XX).

IV.H. Preparation of Peptide Epitopes

[0172] Peptides in accordance with the invention can be prepared synthetically, by recombinant DNA technology or chemical synthesis, or from natural sources such as native tumors or pathogenic organisms. Peptide epitopes may be synthesized individually or as polyepitopic peptides. Although the peptide will preferably be substantially free of other naturally occurring host cell proteins and fragments thereof, in some embodiments the peptides may be synthetically conjugated to native fragments or particles.

[0173] The peptides in accordance with the invention can be a variety of lengths, and either in their neutral (uncharged) forms or in forms which are salts. The peptides in accordance with the invention are either free of modifications such as glycosylation, side chain oxidation, or phosphorylation; or they contain these modifications, subject to the condition that modifications do not destroy the biological activity of the peptides as described herein.

[0174] Desirably, the peptide epitope will be as small as possible while still maintaining substantially all of the immunologic activity of the native protein. When possible, it may be desirable to optimize HLA class I binding peptide epitopes of the invention to a length of about 8 to about 13 amino acid residues, preferably 9 to 10. HLA class II binding peptide epitopes may be optimized to a length of about 6 to about 30 amino acids in length, preferably to between about 13 and about 20 residues. Preferably, the peptide epitopes are commensurate in size with endogenously processed pathogen-derived peptides or tumor cell peptides that are bound to the relevant HLA molecules.

[0175] The identification and preparation of peptides of other lengths can also be carried out using the techniques described herein. Moreover, it is preferred to identify native peptide regions that contain a high concentration of class I and/or class II epitopes. Such a sequence is generally selected on the basis that it contains the greatest number of epitopes per amino acid length. It is to be appreciated that epitopes can be present in a frame-shifted manner, e.g. a 10 amino acid long peptide could contain two 9 amino acid long epitopes and one 10 amino acid long epitope; upon intracellular processing, each epitope can be exposed and bound by an HLA molecule upon administration of such a peptide. This larger, preferably multi-epitopic, peptide can be generated synthetically, recombinantly, or via cleavage from the native source.

[0176] The peptides of the invention can be prepared in a wide variety of ways. For the preferred relatively short size, the peptides can be synthesized in solution or on a solid support in accordance with conventional techniques. Various automatic synthesizers are commercially available and can be used in accordance with known protocols. (See, for example, Stewart & Young, SOLID PHASE PEPTIDE SYNTHESIS, 2D. ED, Pierce Chemical Co., 1984). Further, individual peptide epitopes can be joined using chemical ligation to produce larger peptides that are still within the bounds of the invention.

[0177] Alternatively, recombinant DNA technology can be employed wherein a nucleotide sequence which encodes an immunogenic peptide of interest is inserted into an expression vector, transformed or transfected into an appropriate host cell and cultivated under conditions suitable for expression. These procedures are generally known in the art, as described generally in Sambrook et al., MOLECULAR CLONING, A LABORATORY MANUAL, Cold Spring Harbor Press, Cold Spring Harbor, N.Y. (1989). Thus, recombinant polypeptides which comprise one or more peptide sequences of the invention can be used to present the appropriate T cell epitope.

[0178] The nucleotide coding sequence for peptide epitopes of the preferred lengths contemplated herein can be synthesized by chemical techniques, for example, the phosphotriester method of Matteucci, et al., J. Am. Chem. Soc. 103:3185 (1981). Peptide analogs can be made simply by substituting the appropriate and desired nucleic acid base(s) for those that encode the native peptide sequence; exemplary nucleic acid substitutions are those that encode an amino acid defined by the motifs/supermotifs herein. The coding sequence can then be provided with appropriate linkers and ligated into expression vectors commonly available in the art, and the vectors used to transform suitable hosts to produce the desired fusion protein. A number of such vectors and suitable host systems are now available. For expression of the fusion proteins, the coding sequence will be provided with operably linked start and stop codons, promoter and terminator regions and usually a replication system to provide an expression vector for expression in the desired cellular host. For example, promoter sequences compatible with bacterial hosts are provided in plasmids containing convenient restriction sites for insertion of the desired coding sequence. The resulting expression vectors are transformed into suitable bacterial hosts. Of course, yeast, insect or mammalian cell hosts may also be used, employing suitable vectors and control sequences.

IV.I. Assays to Detect T-Cell Responses

[0179] Once HLA binding peptides are identified, they can be tested for the ability to elicit a T-cell response. The preparation and evaluation of motif-bearing peptides are described in PCT publications WO 94/20127 and WO 94/03205. Briefly, peptides comprising epitopes from a particular antigen are synthesized and tested for their ability to bind to the appropriate HLA proteins. These assays may involve evaluating the binding of a peptide of the invention to purified HLA class I molecules in relation to the binding of a radioiodinated reference peptide. Alternatively, cells expressing empty class I molecules (i.e. lacking peptide therein) may be evaluated for peptide binding by immunofluorescent staining and flow microfluorimetry. Other assays that may be used to evaluate peptide binding include peptide-dependent class I assembly assays and/or the inhibition of CTL recognition by peptide competition. Those peptides that bind to the class I molecule, typically with an affinity of 500 nM or less, are further evaluated for their ability to serve as targets for CTLs derived from infected or immunized individuals, as well as for their capacity to induce primary in vitro or in vivo CTL responses that can give rise to CTL populations capable of reacting with selected target cells associated with a disease. Corresponding assays are used for evaluation of HLA class II binding peptides. HLA class II motif-bearing peptides that are shown to bind, typically at an affinity of 1000 nM or less, are further evaluated for the ability to stimulate HTL responses.

[0180] Conventional assays utilized to detect T cell responses include proliferation assays, lymphokine secretion assays, direct cytotoxicity assays, and limiting dilution assays. For example, antigen-presenting cells that have been incubated with a peptide can be assayed for the ability to induce CTL responses in responder cell populations. Antigen-presenting cells can be normal cells such as peripheral blood mononuclear cells or dendritic cells. Alternatively, mutant non-human mammalian cell lines that are deficient in their ability to load class I molecules with internally processed peptides and that have been transfected with the appropriate human class I gene, may be used to test for the capacity of the peptide to induce in vitro primary CTL responses.

[0181] Peripheral blood mononuclear cells (PBMCs) may be used as the responder cell source of CTL precursors. The appropriate antigen-presenting cells are incubated with peptide, after which the peptide-loaded antigen-presenting cells are then incubated with the responder cell population under optimized culture conditions. Positive CTL activation can be determined by assaying the culture for the presence of CTLs that kill radio-labeled target cells, both specific peptide-pulsed targets as well as target cells expressing endogenously processed forms of the antigen from which the peptide sequence was derived.

[0182] More recently, a method has been devised which allows direct quantification of antigen-specific T cells by staining with Fluorescein-labelled HLA tetrameric complexes (Altman, J. D. et al., Proc. Natl. Acad. Sci. USA 90:10330, 1993; Altman, J. D. et al., Science 274:94, 1996). Other relatively recent technical developments include staining for intracellular lymphokines, and interferon release assays or ELISPOT assays. Tetramer staining, intracellular lymphokine staining and ELISPOT assays all appear to be at least 10-fold more sensitive than more conventional assays (Lalvani, A. et al., J. Exp. Med. 186:859, 1997; Dunbar, P. R. et al., Curr. Biol. 8:413, 1998; Murali-Krishna, K. et al., Immunity 8:177, 1998).

[0183] HTL activation may also be assessed using such techniques known to those in the art such as T cell proliferation and secretion of lymphokines, e.g. IL-2 (see, e.g. Alexander et al., Immunity 1:751-761, 1994).

[0184] Alternatively, immunization of HLA transgenic mice can be used to determine immunogenicity of peptide epitopes. Several transgenic mouse models including mice with human A2.1, A11 (which can additionally be used to analyze HLA-A3 epitopes), and B7 alleles have been characterized and others (e.g., transgenic mice for HLA-A1 and A24) are being developed. HLA-DR1 and HLA-DR3 mouse models have also been developed. Additional transgenic mouse models with other HLA alleles may be generated as necessary. Mice may be immunized with peptides emulsified in Incomplete Freund's Adjuvant and the resulting T cells tested for their capacity to recognize peptide-pulsed target cells and target cells transfected with appropriate genes. CTL responses may be analyzed using cytotoxicity assays described above. Similarly, HTL responses may be analyzed using such assays as T cell proliferation or secretion of lymphokines.

[0185] Exemplary immunogenic peptide epitopes are set out in Table XXIII.

IV.J. Use of Peptide Epitopes as Diagnostic Agents and for Evaluating Immune Responses

[0186] HLA class I and class II binding peptides as described herein can be used, in one embodiment of the invention, as reagents to evaluate an immune response. The immune response to be evaluated may be induced by using as an immunogen any agent that may result in the production of antigen-specific CTLs or HTLs that recognize and bind to the peptide epitope(s) to be employed as the reagent. The peptide reagent need not be used as the immunogen. Assay systems that may be used for such an analysis include relatively recent technical developments such as tetramers, staining for intracellular lymphokines and interferon release assays, or ELISPOT assays.

[0187] For example, a peptide of the invention may be used in a tetramer staining assay to assess peripheral blood mononuclear cells for the presence of antigen-specific CTLs following exposure to a pathogen or immunogen. The HLA-tetrameric complex is used to directly visualize antigen-specific CTLs (see, e.g., Ogg et al., Science 279:2103-2106, 1998; and Altman et al., Science 174:94-96, 1996) and determine the frequency of the antigen-specific CTL population in a sample of peripheral blood mononuclear cells. A tetramer reagent using a peptide of the invention may be generated as follows: A peptide that binds to an HLA molecule is refolded in the presence of the corresponding HLA heavy chain and β₂-microglobulin to generate a trimolecular complex. The complex is biotinylated at the carboxyl terminal end of the heavy chain at a site that was previously engineered into the protein. Tetramer formation is then induced by the addition of streptavidin. By means of fluorescently labeled streptavidin, the tetramer can be used to stain antigen-specific cells. The cells may then be identified, for example, by flow cytometry. Such an analysis may be used for diagnostic or prognostic purposes.

[0188] Peptides of the invention may also be used as reagents to evaluate immune recall responses. (see, e.g., Bertoni et al., J. Clin. Invest. 100:503-513, 1997 and Penna et al., J. Exp. Med. 174:1565-1570, 1991.) For example, patient PBMC samples from individuals infected with HIV may be analyzed for the presence of antigen-specific CTLs or HTLs using specific peptides. A blood sample containing mononuclear cells may be evaluated by cultivating the PBMCs and stimulating the cells with a peptide of the invention. After an appropriate cultivation period, the expanded cell population may be analyzed, for example, for CTL or for HTL activity.

[0189] The peptides may also be used as reagents to evaluate the efficacy of a vaccine. PBMCs obtained from a patient vaccinated with an immunogen may be analyzed using, for example, either of the methods described above. The patient is HLA typed, and peptide epitope reagents that recognize the allele-specific molecules present in that patient are selected for the analysis. The immunogenicity of the vaccine is indicated by the presence of HIV epitope-specific CTLs and/or HTLs in the PBMC sample.

[0190] The peptides of the invention may also be used to make antibodies, using techniques well known in the art (see, e.g. CURRENTPROTOCOLS IN IMMUNOLOGY, Wiley/Greene, NY; and Antibodies A Laboratory Manual Harlow, Harlow and Lane, Cold Spring Harbor Laboratory Press, 1989), which may be useful as reagents to diagnose HIV infection. Such antibodies include those that recognize a peptide in the context of an HLA molecule, i.e., antibodies that bind to a peptide-MHC complex.

IV.K. Vaccine Compositions

[0191] Vaccines that contain an immunogenically effective amount of one or more peptides as described herein are a further embodiment of the invention. Once appropriately immunogenic epitopes have been defined, they can be delivered by various means, herein referred to as “vaccine” compositions. Such vaccine compositions can include, for example, lipopeptides (e.g., Vitiello, A. et al., J. Clin. Invest. 95:341, 1995), peptide compositions encapsulated in poly(DL-lactide-co-glycolide) (“PLG”) microspheres (see, e.g., Eldridge, et al., Molec. Immunol. 28:287-294, 1991: Alonso et al., Vaccine 12:299-306, 1994; Jones et al., Vaccine 13:675-681, 1995), peptide compositions contained in immune stimulating complexes (ISCOMS) (see, e.g., Takahashi et al., Nature 344:873-875, 1990; Hu et al., Clin Exp Immunol. 113:235-243, 1998), multiple antigen peptide systems (MAPs) (see e.g., Tam, J. P., Proc. Natl. Acad. Sci. U.S.A. 85:5409-5413, 1988; Tam, J. P., J. Immunol. Methods 196:17-32, 1996), viral delivery vectors (Perkus, M. E. et al., In: Concepts in vaccine development, Kaufmann, S. H. E., ed., p. 379, 1996; Chakrabarti, S. et al., Nature 320:535, 1986; Hu, S. L. et al., Nature 320:537, 1986; Kieny, M.-P. et al., AIDS Bio/Technology 4:790, 1986; Top, F. H. et al., J. Infect. Dis. 124:148, 1971; Chanda, P. K. et al., Virology 175:535, 1990), particles of viral or synthetic origin (e.g., Kofler, N. et al., J. Immunol. Methods. 192:25, 1996; Eldridge, J. H. et al., Sem. Hematol. 30:16, 1993; Falo, L. D., Jr. et al., Nature Med. 7:649, 1995), adjuvants (Warren, H. S., Vogel, F. R., and Chedid, L. A. Annu. Rev. Immunol. 4:369, 1986; Gupta, R. K. et al., Vaccine 11:293, 1993), liposomes (Reddy, R. et al., J. Immunol. 148:1585, 1992; Rock, K. L., Immunol. Today 17:131, 1996), or, naked or particle absorbed cDNA (Ulmer, J. B. et al., Science 259:1745, 1993; Robinson, H. L., Hunt, L. A., and Webster, R. G., Vaccine 11:957, 1993; Shiver, J. W. et al., In: Concepts in vaccine development, Kaufmann, S. H. E., ed., p. 423, 1996; Cease, K. B., and Berzofsky, J. A., Annu. Rev. Immunol. 12:923, 1994 and Eldridge, J. H. et al., Sem. Hematol. 30:16, 1993). Toxin-targeted delivery technologies, also known as receptor mediated targeting, such as those of Avant Immunotherapeutics, Inc. (Needham, Mass.) may also be used.

[0192] Furthermore, vaccines in accordance with the invention encompass compositions of one or more of the claimed peptide(s). The peptide(s) can be individually linked to its own carrier; alternatively, the peptide(s) can exist as a homopolymer or heteropolymer of active peptide units. Such a polymer has the advantage of increased immunological reaction and, where different peptide epitopes are used to make up the polymer, the additional ability to induce antibodies and/or CTLs that react with different antigenic determinants of the pathogenic organism or tumor-related peptide targeted for an immune response. The composition may be a naturally occurring region of an antigen or may be prepared, e.g., recombinantly or by chemical synthesis.

[0193] Furthermore, useful carriers that can be used with vaccines of the invention are well known in the art, and include, e.g., thyroglobulin, albumins such as human serum albumin, tetanus toxoid, polyamino acids such as poly L-lysine, poly L-glutamic acid, influenza, hepatitis B virus core protein, and the like. The vaccines can contain a physiologically tolerable (i.e., acceptable) diluent such as water, or saline, preferably phosphate buffered saline. The vaccines also typically include an adjuvant. Adjuvants such as incomplete Freund's adjuvant, aluminum phosphate, aluminum hydroxide, or alum are examples of materials well known in the art. Additionally, as disclosed herein, CTL responses can be primed by conjugating peptides of the invention to lipids, such as tripalmitoyl-S-glycerylcysteinlyseryl-serine (P₃CSS).

[0194] As disclosed in greater detail herein, upon immunization with a peptide composition in accordance with the invention, via injection, aerosol, oral, transdermal, transmucosal, intrapleural, intrathecal, or other suitable routes, the immune system of the host responds to the vaccine by producing large amounts of CTLs and/or HTLs specific for the desired antigen. Consequently, the host becomes at least partially immune to later infection, or at least partially resistant to developing an ongoing chronic infection, or derives at least some therapeutic benefit when the antigen was tumor-associated.

[0195] In some instances it may be desirable to combine the class I peptide vaccines of the invention with vaccines which induce or facilitate neutralizing antibody responses to the target antigen of interest, particularly to viral envelope antigens. A preferred embodiment of such a composition comprises class I and class II epitopes in accordance with the invention. An alternative embodiment of such a composition comprises a class I and/or class II epitope in accordance with the invention, along with a PADRE™ (Epimmune, San Diego, Calif.) molecule (described, for example, in U.S. Pat. No. 5,736,142). Furthermore, any of these embodiments can be administered as a nucleic acid mediated modality.

[0196] The vaccine compositions of the invention may also be used in combination with antiviral drugs such as interferon-α.

[0197] For therapeutic or prophylactic immunization purposes, the peptides of the invention can also be expressed by viral or bacterial vectors. Examples of expression vectors include attenuated viral hosts, such as vaccinia or fowlpox. This approach involves the use of vaccinia virus, for example, as a vector to express nucleotide sequences that encode the peptides of the invention. Upon introduction into an acutely or chronically infected host or into a non-infected host, the recombinant vaccinia virus expresses the immunogenic peptide, and thereby elicits a host CTL and/or HTL response. Vaccinia vectors and methods useful in immunization protocols are described in, e.g., U.S. Pat. No. 4,722,848. Another vector is BCG (Bacille Calmette Guerin). BCG vectors are described in Stover et al., Nature 351:456-460 (1991). A wide variety of other vectors useful for therapeutic administration or immunization of the peptides of the invention, e.g. adeno and adeno-associated virus vectors, retroviral vectors, Salmonella typhi vectors, detoxified anthrax toxin vectors, and the like, will be apparent to those skilled in the art from the description herein.

[0198] Antigenic peptides are used to elicit a CTL and/or HTL response ex vivo, as well. The resulting CTL or HTL cells, can be used to treat chronic infections, or tumors in patients that do not respond to other conventional forms of therapy, or will not respond to a therapeutic vaccine peptide or nucleic acid in accordance with the invention. Ex vivo CTL or HTL responses to a particular antigen (infectious or tumor-associated antigen) are induced by incubating in tissue culture the patient's, or genetically compatible, CTL or HTL precursor cells together with a source of antigen-presenting cells (APC), such as dendritic cells, and the appropriate immunogenic peptide. After an appropriate incubation time (typically about 7-28 days), in which the precursor cells are activated and expanded into effector cells, the cells are infused back into the patient, where they will destroy (CTL) or facilitate destruction (HTL) of their specific target cell (an infected cell or a tumor cell). Transfected dendritic cells may also be used as antigen presenting cells. Alternatively, dendritic cells are transfected, e.g., with a minigene construct in accordance with the invention, in order to elicit immune responses. Minigenes will be discussed in greater detail in a following section.

[0199] Vaccine compositions may also be administered in vivo in combination with dendritic cell mobilization whereby loading of dendritic cells occurs in vivo.

[0200] DNA or RNA encoding one or more of the peptides of the invention can also be administered to a patient. This approach is described, for instance, in Wolff et. al., Science 247:1465 (1990) as well as U.S. Pat. Nos. 5,580,859; 5,589,466; 5,804,566; 5,739,118; 5,736,524; 5,679,647; WO 98/04720; and in more detail below. Examples of DNA-based delivery technologies include “naked DNA”, facilitated (bupivicaine, polymers, peptide-mediated) delivery, cationic lipid complexes, and particle-mediated (“gene gun”) or pressure-mediated delivery (see, e.g., U.S. Pat. No. 5,922,687).

[0201] Preferably, the following principles are utilized when selecting an array of epitopes for inclusion in a polyepitopic composition for use in a vaccine, or for selecting discrete epitopes to be included in a vaccine and/or to be encoded by nucleic acids such as a minigene. Exemplary epitopes that may be utilized in a vaccine to treat or prevent HIV infection are set out in Tables XXXVII and XXXVIII. It is preferred that each of the following principles are balanced in order to make the selection. The multiple epitopes to be incorporated in a given vaccine composition may be, but need not be, contiguous in sequence in the native antigen from which the epitopes are derived.

[0202] 1.) Epitopes are selected which, upon administration, mimic immune responses that have been observed to be correlated with HIV clearance. For HLA Class I this includes 3-4 epitopes that come from at least one antigen of HIV. For HLA Class II a similar rationale is employed; again 3-4 epitopes are selected from at least one HIV antigen (see e.g., Rosenberg et al., Science 278:1447-1450).

[0203] 2.) Epitopes are selected that have the requisite binding affinity established to be correlated with immunogenicity: for HLA Class I an IC₅₀ of 500 nM or less, or for Class II an IC₅₀ of 1000 nM or less.

[0204] 3.) Sufficient supermotif bearing-peptides, or a sufficient array of allele-specific motif-bearing peptides, are selected to give broad population coverage. For example, it is preferable to have at least 80% population coverage. A Monte Carlo analysis, a statistical evaluation known in the art, can be employed to assess the breadth, or redundancy of, population coverage.

[0205] 4.) When selecting epitopes from cancer-related antigens it is often preferred to select analogs because the patient may have developed tolerance to the native epitope. When selecting epitopes for infectious disease-related antigens it is preferable to select either native or analoged epitopes. Of particular relevance for infectious disease vaccines (but for cancer-related vaccines as well), are epitopes referred to as “nested epitopes.” Nested epitopes occur where at least two epitopes overlap in a given peptide sequence. A peptide comprising “transcendent nested epitopes” is a peptide that has both HLA class I and HLA class II epitopes in it.

[0206] When providing nested epitopes, it is preferable to provide a sequence that has the greatest number of epitopes per provided sequence. Preferably, one avoids providing a peptide that is any longer than the amino terminus of the amino terminal epitope and the carboxyl terminus of the carboxyl terminal epitope in the peptide. When providing a longer peptide sequence, such as a sequence comprising nested epitopes, it is important to screen the sequence in order to insure that it does not have pathological or other deleterious biological properties.

[0207] 5.) When creating a minigene, as disclosed in greater detail in the following section, an objective is to generate the smallest peptide possible that encompasses the epitopes of interest. The principles employed are similar, if not the same as those employed when selecting a peptide comprising nested epitopes. Furthermore, upon determination of the nucleic acid sequence to be provided as a minigene, the peptide encoded thereby is analyzed to determine whether any “junctional epitopes” have been created. A junctional epitope is an actual binding epitope, as predicted, e.g., by motif analysis, that only exists because two discrete peptide sequences are encoded directly next to each other. Junctional epitopes are generally to be avoided because the recipient may generate an immune response to that non-native epitope. Of particular concern is a junctional epitope that is a “dominant epitope.” A dominant epitope may lead to such a zealous response that immune responses to other epitopes are diminished or suppressed.

IV.K.1. Minigene Vaccines

[0208] A growing body of experimental evidence demonstrates that a number of different approaches are available which allow simultaneous delivery of multiple epitopes. Nucleic acids encoding the peptides of the invention are a particularly useful embodiment of the invention. Epitopes for inclusion in a minigene are preferably selected according to the guidelines set forth in the previous section. A preferred means of administering nucleic acids encoding the peptides of the invention uses minigene constructs encoding a peptide comprising one or multiple epitopes of the invention. The use of multi-epitope minigenes is described below and in, e.g., co-pending application U.S. Ser. No. 09/311,784; Ishioka et al., J. Immunol. 162:3915-3925, 1999; An, L. and Whitton, J. L., J. Virol. 71:2292, 1997; Thomson, S. A. et al., J. Immunol. 157:822, 1996; Whitton, J. L. et al., J. Virol. 67:348, 1993; Hanke, R. et al., Vaccine 16:426, 1998. For example, a multi-epitope DNA plasmid encoding nine dominant HLA-A*0201- and A11-restricted epitopes derived from the polymerase, envelope, and core proteins of HBV and human immunodeficiency virus (HIV), the PADRE™ universal helper T cell (HTL) epitope, and an endoplasmic reticulum-translocating signal sequence was engineered. Immunization of HLA transgenic mice with this plasmid construct resulted in strong CTL induction responses against the nine epitopes tested, similar to those observed with a lipopeptide of known immunogenicity in humans, and significantly greater than immunization in oil-based adjuvants. Moreover, the immunogenicity of DNA-encoded epitopes in vivo correlated with the in vitro responses of specific CTL lines against target cells transfected with the DNA plasmid. Thus, these data show that the minigene served to both: 1.) generate a CTL response and 2.) that the induced CTLs recognized cells expressing the encoded epitopes. A similar approach may be used to develop minigenes encoding HIV epitopes.

[0209] For example, to create a DNA sequence encoding the selected epitopes (minigene) for expression in human cells, the amino acid sequences of the epitopes may be reverse translated. A human codon usage table can be used to guide the codon choice for each amino acid. These epitope-encoding DNA sequences may be directly adjoined, so that when translated, a continuous polypeptide sequence is created. To optimize expression and/or immunogenicity, additional elements can be incorporated into the minigene design. Examples of amino acid sequences that can be reverse translated and included in the minigene sequence include: HLA class I epitopes, HLA class II epitopes, a ubiquitination signal sequence, and/or an endoplasmic reticulum targeting signal. In addition, HLA presentation of CTL and HTL epitopes may be improved by including synthetic (e.g. poly-alanine) or naturally-occurring flanking sequences adjacent to the CTL or HTL epitope; these larger peptides comprising the epitope(s) are within the scope of the invention.

[0210] The minigene sequence may be converted to DNA by assembling oligonucleotides that encode the plus and minus strands of the minigene. Overlapping oligonucleotides (30-100 bases long) may be synthesized, phosphorylated, purified and annealed under appropriate conditions using well known techniques. The ends of the oligonucleotides can be joined, for example, using T4 DNA ligase. This synthetic minigene, encoding the epitope polypeptide, can then be cloned into a desired expression vector.

[0211] Standard regulatory sequences well known to those of skill in the art are preferably included in the vector to ensure expression in the target cells. Several vector elements are desirable: a promoter with a down-stream cloning site for minigene insertion; a polyadenylation signal for efficient transcription termination; an E. coli origin of replication; and an E. coli selectable marker (e.g. ampicillin or kanamycin resistance). Numerous promoters can be used for this purpose, e.g., the human cytomegalovirus (hCMV) promoter. See, e.g., U.S. Pat. Nos. 5,580,859 and 5,589,466 for other suitable promoter sequences.

[0212] Additional vector modifications may be desired to optimize minigene expression and immunogenicity. In some cases, introns are required for efficient gene expression, and one or more synthetic or naturally-occurring introns could be incorporated into the transcribed region of the minigene. The inclusion of mRNA stabilization sequences and sequences for replication in mammalian cells may also be considered for increasing minigene expression.

[0213] Once an expression vector is selected, the minigene is cloned into the polylinker region downstream of the promoter. This plasmid is transformed into an appropriate E. coli strain, and DNA is prepared using standard techniques. The orientation and DNA sequence of the minigene, as well as all other elements included in the vector, are confirmed using restriction mapping and DNA sequence analysis. Bacterial cells harboring the correct plasmid can be stored as a master cell bank and a working cell bank.

[0214] In addition, immunostimulatory sequences (ISSs or CpGs) appear to play a role in the immunogenicity of DNA vaccines. These sequences may be included in the vector, outside the minigene coding sequence, if desired to enhance immunogenicity.

[0215] In some embodiments, a bi-cistronic expression vector which allows production of both the minigene-encoded epitopes and a second protein (included to enhance or decrease immunogenicity) can be used. Examples of proteins or polypeptides that could beneficially enhance the immune response if co-expressed include cytokines (e.g., IL-2, IL-12, GM-CSF), cytokine-inducing molecules (e.g., LeIF), costimulatory molecules, or for HTL responses, pan-DR binding proteins (PADRE™, Epinimune, San Diego, Calif.). Helper (HTL) epitopes can be joined to intracellular targeting signals and expressed separately from expressed CTL epitopes; this allows direction of the HTL epitopes to a cell compartment different than that of the CTL epitopes. If required, this could facilitate more efficient entry of HTL epitopes into the HLA class II pathway, thereby improving HTL induction. In contrast to HTL or CTL induction, specifically decreasing the immune response by co-expression of immunosuppressive molecules (e.g. TGF-β) may be beneficial in certain diseases.

[0216] Therapeutic quantities of plasmid DNA can be produced for example, by fermentation in E. coli, followed by purification. Aliquots from the working cell bank are used to inoculate growth medium, and grown to saturation in shaker flasks or a bioreactor according to well known techniques. Plasmid DNA can be purified using standard bioseparation technologies such as solid phase anion-exchange resins supplied by QIAGEN, Inc. (Valencia, Calif.). If required, supercoiled DNA can be isolated from the open circular and linear forms using gel electrophoresis or other methods.

[0217] Purified plasmid DNA can be prepared for injection using a variety of formulations. The simplest of these is reconstitution of lyophilized DNA in sterile phosphate-buffer saline (PBS). This approach, known as “naked DNA,” is currently being used for intramuscular (IM) administration in clinical trials. To maximize the immunotherapeutic effects of minigene DNA vaccines, an alternative method for formulating purified plasmid DNA may be desirable. A variety of methods have been described, and new techniques may become available. Cationic lipids, glycolipids, and fusogenic liposomes can also be used in the formulation (see, e.g., as described by WO 93/24640; Mannino & Gould-Fogerite, BioTechniques 6(7): 682 (1988); U.S. Pat. No. 5,279,833; WO 91/06309; and Felgner, et al., Proc. Nat'l Acad. Sci. USA 84:7413 (1987). In addition, peptides and compounds referred to collectively as protective, interactive, non-condensing compounds (PINC) could also be complexed to purified plasmid DNA to influence variables such as stability, intramuscular dispersion, or trafficking to specific organs or cell types.

[0218] Target cell sensitization can be used as a functional assay for expression and HLA class I presentation of minigene-encoded CTL epitopes. For example, the plasmid DNA is introduced into a mammalian cell line that is suitable as a target for standard CTL chromium release assays. The transfection method used will be dependent on the final formulation. Electroporation can be used for “naked” DNA, whereas cationic lipids allow direct in vitro transfection. A plasmid expressing green fluorescent protein (GFP) can be co-transfected to allow enrichment of transfected cells using fluorescence activated cell sorting (FACS). These cells are then chromium-51 (⁵¹Cr) labeled and used as target cells for epitope-specific CTL lines; cytolysis, detected by ⁵¹Cr release, indicates both production of, and HLA presentation of, minigene-encoded CTL epitopes. Expression of HTL epitopes may be evaluated in an analogous manner using assays to assess HTL activity.

[0219] In vivo immunogenicity is a second approach for functional testing of minigene DNA formulations. Transgenic mice expressing appropriate human HLA proteins are immunized with the DNA product. The dose and route of administration are formulation dependent (e.g., IM for DNA in PBS, intraperitoneal (IP) for lipid-complexed DNA). Twenty-one days after immunization, splenocytes are harvested and restimulated for one week in the presence of peptides encoding each epitope being tested. Thereafter, for CTL effector cells, assays are conducted for cytolysis of peptide-loaded, ⁵Cr-labeled target cells using standard techniques. Lysis of target cells that were sensitized by HLA loaded with peptide epitopes, corresponding to minigene-encoded epitopes, demonstrates DNA vaccine function for in vivo induction of CTLs. Immunogenicity of HTL epitopes is evaluated in transgenic mice in an analogous manner.

[0220] Alternatively, the nucleic acids can be administered using ballistic delivery as described, for instance, in U.S. Pat. No. 5,204,253. Using this technique, particles comprised solely of DNA are administered. In a further alternative embodiment, DNA can be adhered to particles, such as gold particles.

IV.K2. Combinations of CTL Peptides with Helper Peptides

[0221] Vaccine compositions comprising the peptides of the present invention, or analogs thereof, which have immunostimulatory activity may be modified to provide desired attributes, such as improved serum half life, or to enhance immunogenicity.

[0222] For instance, the ability of a peptide to induce CTL activity can be enhanced by linking the peptide to a sequence which contains at least one epitope that is capable of inducing a T helper cell response. The use of T helper epitopes in conjunction with CTL epitopes to enhance immunogenicity is illustrated, for example, in the co-pending applications U.S. Ser. No. 08/820,360, U.S. Ser. No. 08/197,484, and U.S. Ser. No. 08/464,234.

[0223] Particularly preferred CTL epitope/HTL epitope conjugates are linked by a spacer molecule. The spacer is typically comprised of relatively small, neutral molecules, such as amino acids or amino acid mimetics, which are substantially uncharged under physiological conditions. The spacers are typically selected from, e.g., Ala, Gly, or other neutral spacers of nonpolar amino acids or neutral polar amino acids. It will be understood that the optionally present spacer need not be comprised of the same residues and thus may be a hetero- or homo-oligomer. When present, the spacer will usually be at least one or two residues, more usually three to six residues. Alternatively, the CTL peptide may be linked to the T helper peptide without a spacer.

[0224] The CTL peptide epitope may be linked to the T helper peptide epitope either directly or via a spacer either at the amino or carboxy terminus of the CTL peptide. The amino terminus of either the immunogenic peptide or the T helper peptide may be acylated. The HTL peptide epitopes used in the invention can be modified in the same manner as CTL peptides. For instance, they may be modified to include D-amino acids or be conjugated to other molecules such as lipids, proteins, sugars and the like.

[0225] In certain embodiments, the T helper peptide is one that is recognized by T helper cells present in the majority of the population. This can be accomplished by selecting amino acid sequences that bind to many, most, or all of the HLA class II molecules. These are known as “loosely HLA-restricted” or “promiscuous” T helper sequences. Examples of amino acid sequences that are promiscuous include sequences from antigens such as tetanus toxoid at positions 830-843 (QYIKANSKFIGITE), Plasmodium falciparum CS protein at positions 378-398 (DIEKKMAKMEKASSVFNVVNS), and Streptococcus 18 kD protein at positions 116 (GAVDSILGGVATYGAA). Other examples include peptides bearing a DR 1-4-7 supermotif, or either of the DR3 motifs.

[0226] Alternatively, it is possible to prepare synthetic peptides capable of stimulating T helper lymphocytes, in a loosely HLA-restricted fashion, using amino acid sequences not found in nature (see, e.g., PCT publication WO 95/07707). These synthetic compounds called Pan-DR-binding epitopes (e.g., PADRE™, Epimmune, Inc., San Diego, Calif.) are designed to most preferrably bind most HLA-DR (human HLA class II) molecules. For instance, a pan-DR-binding epitope peptide having the formula: aKXVWANTLKAAa, where “X” is either cyclohexylalanine, phenylalanine, or tyrosine, and a is either D-alanine or L-alanine, has been found to bind to most HLA-DR alleles, and to stimulate the response of T helper lymphocytes from most individuals, regardless of their BLA type. An alternative of a pan-DR binding epitope comprises all “L” natural amino acids and can be provided in the form of nucleic acids that encode the epitope.

[0227] HTL peptide epitopes can also be modified to alter their biological properties. For example, peptides comprising HTL epitopes can contain D-amino acids to increase their resistance to proteases and thus extend their serum half-life. Also, the epitope peptides of the invention can be conjugated to other molecules such as lipids, proteins or sugars, or any other synthetic compounds, to increase their biological activity. Specifically, the T helper peptide can be conjugated to one or more palmitic acid chains at either the amino or carboxyl termini.

[0228] In some embodiments it may be desirable to include in the pharmaceutical compositions of the invention at least one component which primes cytotoxic T lymphocytes. Lipids have been identified as agents capable of priming CTL in vivo against viral antigens. For example, palmitic acid residues can be attached to the ε-and α-amino groups of a lysine residue and then linked, e.g., via one or more linking residues such as Gly, Gly-Gly-, Ser, Ser-Ser, or the like, to an immunogenic peptide. The lipidated peptide can then be administered either directly in a micelle or particle, incorporated into a liposome, or emulsified in an adjuvant, e.g., incomplete Freund's adjuvant. In a preferred embodiment, a particularly effective immunogenic comprises palmitic acid attached to ε- and α-amino groups of Lys, which is attached via linkage, e.g., Ser-Ser, to the amino terminus of the immunogenic peptide.

[0229] As another example of lipid priming of CTL responses, E. coli lipoproteins, such as tripalmitoyl-S-glycerylcysteinlyseryl serine (P₃CSS) can be used to prime virus specific CTL when covalently attached to an appropriate peptide. (See, e.g., Deres, et al., Nature 342:561, 1989). Peptides of the invention can be coupled to P₃CSS, for example, and the lipopeptide administered to an individual to specifically prime a CTL response to the target antigen. Moreover, because the induction of neutralizing antibodies can also be primed with P₃CSS-conjugated epitopes, two such compositions can be combined to more effectively elicit both humoral and cell-mediated responses to infection.

[0230] As noted herein, additional amino acids can be added to the termini of a peptide to provide for ease of linking peptides one to another, for coupling to a carrier support or larger peptide, for modifying the physical or chemical properties of the peptide or oligopeptide, or the like. Amino acids such as tyrosine, cysteine, lysine, glutamic or aspartic acid, or the like, can be introduced at the C- or N-terminus of the peptide or oligopeptide, particularly class I peptides. However, it is to be noted that modification at the carboxyl terminus of a CTL epitope may, in some cases, alter binding characteristics of the peptide. In addition, the peptide or oligopeptide sequences can differ from the natural sequence by being modified by terminal-NH₂ acylation, e.g., by alkanoyl (C₁-C₂₀) or thioglycolyl acetylation, terminal-carboxylamidation, e.g. ammonia, methylamine, etc. In some instances these modifications may provide sites for linking to a support or other molecule.

IV.L. Administration of Vaccines for Therapeutic or Prophylactic Purposes

[0231] The peptides of the present invention and pharmaceutical and vaccine compositions of the invention are useful for administration to mammals, particularly humans, to treat and/or prevent HIV infection. Vaccine compositions containing the peptides of the invention are administered to a patient infected with HIV or to an individual susceptible to, or otherwise at risk for, HIV infection to elicit an immune response against HIV antigens and thus enhance the patient's own immune response capabilities. In therapeutic applications, peptide and/or nucleic acid compositions are administered to a patient in an amount sufficient to elicit an effective CTL and/or HTL response to the virus antigen and to cure or at least partially arrest or slow symptoms and/or complications. An amount adequate to accomplish this is defined as “therapeutically effective dose.” Amounts effective for this use will depend on, e.g., the particular composition administered, the manner of administration, the stage and severity of the disease being treated, the weight and general state of health of the patient, and the judgment of the prescribing physician.

[0232] The vaccine compositions of the invention may also be used purely as prophylactic agents. Generally the dosage for an initial prophylactic immunization generally occurs in a unit dosage range where the lower value is about 1, 5, 50, 500, or 1000 μg and the higher value is about 10,000; 20,000; 30,000; or 50,000 μg. Dosage values for a human typically range from about 500 μg to about 50,000 μg per 70 kilogram patient. This is followed by boosting dosages of between about 1.0 μg to about 50,000 μg of peptide administered at defined intervals from about four weeks to six months after the initial administration of vaccine. The immunogenicity of the vaccine may be assessed by measuring the specific activity of CTL and HTL obtained from a sample of the patient's blood.

[0233] As noted above, peptides comprising CTL and/or HTL epitopes of the invention induce immune responses when presented by HLA molecules and contacted with a CTL or HTL specific for an epitope comprised by the peptide. The manner in which the peptide is contacted with the CTL or HTL is not critical to the invention. For instance, the peptide can be contacted with the CTL or HTL either in vivo or in vitro. If the contacting occurs in vivo, the peptide itself can be administered to the patient, or other vehicles, e.g., DNA vectors encoding one or more peptides, viral vectors encoding the peptide(s), liposomes and the like, can be used, as described herein.

[0234] For pharmaceutical compositions, the immunogenic peptides of the invention, or DNA encoding them, are generally administered to an individual already infected with HIV. The peptides or DNA encoding them can be administered individually or as fusions of one or more peptide sequences. Those in the incubation phase or the acute phase of infection can be treated with the immunogenic peptides separately or in conjunction with other treatments, as appropriate.

[0235] For therapeutic use, administration should generally begin at the first diagnosis of HIV infection. This is followed by boosting doses until at least symptoms are substantially abated and for a period thereafter. In chronic infection, loading doses followed by boosting doses may be required.

[0236] Treatment of an infected individual with the compositions of the invention may hasten resolution of the infection in acutely infected individuals and prevent development of chronic infection. Where susceptible individuals are identified prior to or during infection, the composition can be targeted to them, thus minimizing the need for administration to a larger population.

[0237] The peptide or other compositions used for the treatment or prophylaxis of HIV infection can be used, e.g., in persons who have not manifested symptoms of disease but who act as a disease vector. In this context, it is generally important to provide an amount of the peptide epitope delivered by a mode of administration sufficient to effectively stimulate a cytotoxic T cell response; compositions which stimulate helper T cell responses can also be given in accordance with this embodiment of the invention.

[0238] The dosage for an initial therapeutic immunization generally occurs in a unit dosage range where the lower value is about 1, 5, 50, 500, or 1,000 μg and the higher value is about 10,000; 20,000; 30,000; or 50,000 μg. Dosage values for a human typically range from about 500 μg to about 50,000 μg per 70 kilogram patient. Boosting dosages of between about 1.0 μg to about 50,000 μg of peptide pursuant to a boosting regimen over weeks to months may be administered depending upon the patient's response and condition as determined by measuring the specific activity of CTL and HTL obtained from the patient's blood. The peptides and compositions of the present invention may be employed in serious disease states, that is, life-threatening or potentially life threatening situations. In such cases, as a result of the minimal amounts of extraneous substances and the relative nontoxic nature of the peptides in preferred compositions of the invention, it is possible and may be felt desirable by the treating physician to administer substantial excesses of these peptide compositions relative to these stated dosage amounts.

[0239] Thus, for treatment of chronic infection, a representative dose is in the range disclosed above, namely where the lower value is about 1, 5, 50, 500, or 1,000 μg and the higher value is about 10,000; 20,000; 30,000; or 50,000 μg, preferably from about 500 μg to about 50,000 μg per 70 kilogram patient. Initial doses followed by boosting doses at established intervals, e.g., from four weeks to six months, may be required, possibly for a prolonged period of time to effectively immunize an individual. In the case of chronic infection, administration should continue until at least clinical symptoms or laboratory tests indicate that the viral infection has been eliminated or substantially abated and for a period thereafter. The dosages, routes of administration, and dose schedules are adjusted in accordance with methodologies known in the art.

[0240] The pharmaceutical compositions for therapeutic treatment are intended for parenteral, topical, oral, intrathecal, or local administration. Preferably, the pharmaceutical compositions are administered parentally, e.g., intravenously, subcutaneously, intradermally, or intramuscularly. Thus, the invention provides compositions for parenteral administration which comprise a solution of the immunogenic peptides dissolved or suspended in an acceptable carrier, preferably an aqueous carrier. A variety of aqueous carriers may be used, e.g., water, buffered water, 0.8% saline, 0.3% glycine, hyaluronic acid and the like. These compositions may be sterilized by conventional, well known sterilization techniques, or may be sterile filtered. The resulting aqueous solutions may be packaged for use as is, or lyophilized, the lyophilized preparation being combined with a sterile solution prior to administration. The compositions may contain pharmaceutically acceptable auxiliary substances as required to approximate physiological conditions, such as pH-adjusting and buffering agents, tonicity adjusting agents, wetting agents, preservatives, and the like, for example, sodium acetate, sodium lactate, sodium chloride, potassium chloride, calcium chloride, sorbitan monolaurate, triethanolamine oleate, etc.

[0241] The concentration of peptides of the invention in the pharmaceutical formulations can vary widely, i.e., from less than about 0.1%, usually at or at least about 2% to as much as 20% to 50% or more by weight, and will be selected primarily by fluid volumes, viscosities, etc., in accordance with the particular mode of administration selected.

[0242] A human unit dose form of the peptide composition is typically included in a pharmaceutical composition that comprises a human unit dose of an acceptable carrier, preferably an aqueous carrier, and is administered in a volume of fluid that is known by those of skill in the art to be used for administration of such compositions to humans (see, e.g., Remington's Pharmaceutical Sciences, 17^{th Edition, A. Gennaro, Editor, Mack Publishing Co., Easton, Pa.,} 1985).

[0243] The peptides of the invention may also be administered via liposomes, which serve to target the peptides to a particular tissue, such as lymphoid tissue, or to target selectively to infected cells, as well as to increase the half-life of the peptide composition. Liposomes include emulsions, foams, micelles, insoluble monolayers, liquid crystals, phospholipid dispersions, lamellar layers and the like. In these preparations, the peptide to be delivered is incorporated as part of a liposome, alone or in conjunction with a molecule which binds to a receptor prevalent among lymphoid cells, such as monoclonal antibodies which bind to the CD45 antigen, or with other therapeutic or immunogenic compositions. Thus, liposomes either filled or decorated with a desired peptide of the invention can be directed to the site of lymphoid cells, where the liposomes then deliver the peptide compositions. Liposomes for use in accordance with the invention are formed from standard vesicle-forming lipids, which generally include neutral and negatively charged phospholipids and a sterol, such as cholesterol. The selection of lipids is generally guided by consideration of, e.g., liposome size, acid liability and stability of the liposomes in the blood stream. A variety of methods are available for preparing liposomes, as described in, e.g., Szoka, et al., Ann. Rev. Biophys. Bioeng. 9:467 (1980), and U.S. Pat. Nos. 4,235,871, 4,501,728, 4,837,028, and 5,019,369.

[0244] For targeting cells of the immune system, a ligand to be incorporated into the liposome can include, e.g., antibodies or fragments thereof specific for cell surface determinants of the desired immune system cells. A liposome suspension containing a peptide may be administered intravenously, locally, topically, etc. in a dose which varies according to, inter alia, the manner of administration, the peptide being delivered, and the stage of the disease being treated.

[0245] For solid compositions, conventional nontoxic solid carriers may be used which include, for example, pharmaceutical grades of mannitol, lactose, starch, magnesium stearate, sodium saccharin, talcum, cellulose, glucose, sucrose, magnesium carbonate, and the like. For oral administration, a pharmaceutically acceptable nontoxic composition is formed by incorporating any of the normally employed excipients, such as those carriers previously listed, and generally 10-95% of active ingredient, that is, one or more peptides of the invention, and more preferably at a concentration of 25%-75%.

[0246] For aerosol administration, the immunogenic peptides are preferably supplied in finely divided form along with a surfactant and propellant. Typical percentages of peptides are 0.01%-20% by weight, preferably 1%-10%. The surfactant must, of course, be nontoxic, and preferably soluble in the propellant. Representative of such agents are the esters or partial esters of fatty acids containing from 6 to 22 carbon atoms, such as caproic, octanoic, lauric, palmitic, stearic, linoleic, linolenic, olesteric and oleic acids with an aliphatic polyhydric alcohol or its cyclic anhydride. Mixed esters, such as mixed or natural glycerides may be employed. The surfactant may constitute 0.1%-20% by weight of the composition, preferably 0.25-5%. The balance of the composition is ordinarily propellant. A carrier can also be included, as desired, as with, e.g., lecithin for intranasal delivery.

IV.M. Kits

[0247] The peptide and nucleic acid compositions of this invention can be provided in kit form together with instructions for vaccine administration. Typically the kit would include desired peptide compositions in a container, preferably in unit dosage form and instructions for administration. An alternative kit would include a minigene construct with desired nucleic acids of the invention in a container, preferably in unit dosage form together with instructions for administration. Lymphokines such as IL-2 or IL-12 may also be included in the kit. Other kit components that may also be desirable include, for example, a sterile syringe, booster dosages, and other desired excipients.

[0248] The invention will be described in greater detail by way of specific examples. The following examples are offered for illustrative purposes, and are not intended to limit the invention in any manner. Those of skill in the art will readily recognize a variety of non-critical parameters that can be changed or modified to yield alternative embodiments in accordance with the invention.

### V. EXAMPLES

[0249] The following examples illustrate identification, selection, and use of immunogenic Class I and Class II peptide epitopes for inclusion in vaccine compositions.

### Example 1

### HLA Class I and Class II Binding Assays

[0250] The following example of peptide binding to HLA molecules demonstrates quantification of binding affinities of HLA class I and class II peptides. Binding assays can be performed with peptides that are either motif-bearing or not motif-bearing.

[0251] Epstein-Barr virus (EBV)-transformed homozygous cell lines, fibroblasts, CIR, or 721.22 transfectants were used as sources of HLA class I molecules. These cells were maintained in vitro by culture in RPMI 1640 medium supplemented with 2 mM L-glutamine (GIBCO, Grand Island, N.Y.), 50 μM 2-ME, 100 μg/ml of streptomycin, 100 U/ml of penicillin (Irvine Scientific) and 10% heat-inactivated FCS (Irvine Scientific, Santa Ana, Calif.). Cells were grown in 225-cm² tissue culture flasks or, for large-scale cultures, in roller bottle apparatuses. The specific cell lines routinely used for purification of MHC class I and class II molecules are listed in Table XXIV.

[0252] Cell lysates were prepared and HLA molecules purified in accordance with disclosed protocols (Sidney et al., Current Protocols in Immunology 18.3.1 (1998); Sidney, et al., J. Immunol. 154:247 (1995); Sette, et al., Mol. Immunol. 31:813 (1994)). Briefly, cells were lysed at a concentration of 10⁸ cells/ml in 50 mM Tris-HCl, pH 8.5, containing 1% Nonidet P-40 (Fluka Biochemika, Buchs, Switzerland), 150 mM NaCl, 5 mM EDTA, and 2 mM PMSF. Lysates were cleared of debris and nuclei by centrifugation at 15,000×g for 30 min.

[0253] HLA molecules were purified from lysates by affinity chromatography. Lysates prepared as above were passed twice through two pre-columns of inactivated Sepharose CL4-B and protein A-Sepharose. Next, the lysate was passed over a column of Sepharose CL-4B beads coupled to an appropriate antibody. The antibodies used for the extraction of HLA from cell lysates are listed in Table XXV. The anti-HLA column was then washed with 10-column volumes of 10 mM Tris-HCL, pH 8.0, in 1% NP-40, PBS, 2-column volumes of PBS, and 2-column volumes of PBS containing 0.4% n-octylglucoside. Finally, MHC molecules were eluted with 50M diethylamine in 0.15M NaCl containing 0.4% n-octylglucoside, pH 11.5. A 1/25 volume of 2.0M Tris, pH 6.8, was added to the eluate to reduce the pH to ˜8.0. Eluates were then be concentrated by centrifugation in Centriprep 30 concentrators at 2000 rpm (Amicon, Beverly, Mass.). Protein content was evaluated by a BCA protein assay (Pierce Chemical Co., Rockford, Ill.) and confirmed by SDS-PAGE.

[0254] A detailed description of the protocol utilized to measure the binding of peptides to Class I and Class II MHC has been published (Sette et al., Mol. Immunol. 31:813, 1994; Sidney et al., in Current Protocols in Immunology, Margulies, Ed., John Wiley & Sons, New York, Section 18.3, 1998). Briefly, purified MHC molecules (5 to 500 nM) were incubated with various unlabeled peptide inhibitors and 1-10 nM ¹²⁵I-radio-labeled probe peptides for 48 h in PBS containing 0.05% Nonidet P-40 (NP40) (or 20% w/v digitonin for H-2 IA assays) in the presence of a protease inhibitor cocktail. The final concentrations of protease inhibitors (each from CalBioChem, La Jolla, Calif.) were 1 mM PMSF, 1.3 nM 1.10 phenanthroline, 73 μM pepstatin A, 8 mM EDTA, 6 mM N-ethylmaleimide (for Class II assays), and 200 μM N alpha-p-tosyl-L-lysine chloromethyl ketone (TLCK). All assays were performed at pH 7.0 with the exception of DRB1*0301, which was performed at pH 4.5, and DRB1*1601 (DR2w21β₁) and DRB4*0101 (DRw53), which were performed at pH 5.0. pH was adjusted as described elsewhere (see Sidney et al., in Current Protocols in Immunology, Margulies, Ed., John Wiley & Sons, New York, Section 18.3, 1998). Following incubation, MHC-peptide complexes were separated from free peptide by gel filtration on 7.8 mm×15 cm TSK200 columns (TosoHaas 16215, Montgomeryville, Pa.), eluted at 1.2 mls/min with PBS pH 6.5 containing 0.5% NP40 and 0.1% NaN₃. Because the large size of the radiolabeled peptide used for the DRB1*1501 (DR2w2β₁) assay makes separation of bound from unbound peaks more difficult under these conditions, all DRB1*1501 (DR2w2β₁) assays were performed using a 7.8 mm×30 cm TSK2000 column eluted at 0.6 mls/min. The eluate from the TSK columns was passed through a Beckman 170 radioisotope detector, and radioactivity was plotted and integrated using a Hewlett-Packard 3396A integrator, and the fraction of peptide bound was determined. Radiolabeled peptides were iodinated using the chloramine-T method. Representative radiolabeled probe peptides utilized in each assay, and its assay specific IC₅₀ nM, are summarized in Tables IV and V. Typically, in preliminary experiments, each MHC preparation was titered in the presence of fixed amounts of radio-labeled peptides to determine the concentration of HLA molecules necessary to bind 10-20% of the total radioactivity. All subsequent inhibition and direct binding assays were performed using these HLA concentrations.

[0255] Since under these conditions [label]<[HLA] and IC₅₀>[HLA], the measured IC₅₀ values are reasonable approximations of the true K_{D} values. Peptide inhibitors are typically tested at concentrations ranging from 120 μg/ml to 1.2 ng/ml, and are tested in two to four completely independent experiments. To allow comparison of the data obtained in different experiments, a relative binding figure is calculated for each peptide by dividing the IC₅₀ of a positive control for inhibition by the IC₅₀ for each tested peptide (typically unlabeled versions of the radiolabeled probe peptide). For database purposes, and inter-experiment comparisons, relative binding values are compiled. These values can subsequently be converted back into IC₅₀ nM values by dividing the IC₅₀ nM of the positive controls for inhibition by the relative binding of the peptide of interest. This method of data compilation has proven to be the most accurate and consistent for comparing peptides that have been tested on different days, or with different lots of purified MHC.

[0256] Because the antibody used for HLA-DR purification (LB3.1) is α-chain specific, β₁ molecules are not separated from β₃ (and/or β₄ and β₅) molecules. The β₁ specificity of the binding assay is obvious in the cases of DRB1*0101 (DR1), DRB1*0802 (DR8w2), and DRB1*0803 (DR8w3), where no P3 is expressed. It has also been demonstrated for DRB1*0301 (DR3) and DRB3*0101 (DR52a), DRB1*0401 (DR4w4), DRB1*0404 (DR4w14), DRB1*0405 (DR4w15), DRB1*1101 (DR5), DRB 1*1201 (DR5w12), DRB1*1302 (DR6w19) and DRB1*0701 (DR7). The problem of β chain specificity for DRB1*1501 (DR2w2p₁), DRB5*0101 (DR2w2P2), DRB1*1601 (DR2w21β₁), DRB5*0201 (DR51Dw21), and DRB4*0101 (DRw53) assays is circumvented by the use of fibroblasts. Development and validation of assays with regard to DRβ molecule specificity have been described previously (see, e.g., Southwood et al., J. Immunol. 160:3363-3373, 1998).

[0257] Binding assays as outlined above may be used to analyze supermotif and/or motif-bearing epitopes as, for example, described in Example 2.

### Example 2

### Identification of HLA Supermotif- and Motif-Bearing CTL Candidate Epitopes

[0258] Vaccine compositions of the invention may include multiple epitopes that comprise multiple HLA supermotifs or motifs to achieve broad population coverage. This example illustrates the identification of supermotif- and motif-bearing epitopes for the inclusion in such a vaccine composition. Calculation of population coverage was performed using the strategy described below.

Computer Searches and Algorthims for Identification of Supermotif and/or Motif-Bearing Epitopes

[0259] The searches performed to identify the motif-bearing peptide sequences in Examples 2 and 5 employed the protein sequence data from HIV-1 clade B virus strains that were available in the 1994 Los Alamos database.

[0260] Computer searches for epitopes bearing HLA Class I or Class II supermotifs or motifs were performed as follows. All translated HIV protein sequences were analyzed using a text string search software program, e.g., MotifSearch 1.4 (D. Brown, San Diego) to identify potential peptide sequences containing appropriate HLA binding motifs; alternative programs are readily produced in accordance with information in the art in view of the motif/supermotif disclosure herein. Furthermore, such calculations can be made mentally. Identified A2-, A3-, and DR-supermotif sequences were scored using polynomial algorithms to predict their capacity to bind to specific HLA-Class I or Class II molecules. These polynomial algorithms take into account both extended and refined motifs (that is, to account for the impact of different amino acids at different positions), and are essentially based on the premise that the overall affinity (or AG) of peptide-HLA molecule interactions can be approximated as a linear polynomial function of the type:
“ΔG”=a_{1i×a}₂ᵢ ×a₃ᵢ . . . ×aₙᵢ,
where aⱼᵢ is a coefficient which represents the effect of the presence of a given amino acid (i) at a given position (i) along the sequence of a peptide of n amino acids. The crucial assumption of this method is that the effects at each position are essentially independent of each other (i.e., independent binding of individual side-chains). When residue j occurs at position i in the peptide, it is assumed to contribute a constant amount ji to the free energy of binding of the peptide irrespective of the sequence of the rest of the peptide. This assumption is justified by studies from our laboratories that demonstrated that peptides are bound to MHC and recognized by T cells in essentially an extended conformation (data omitted herein).

[0261] The method of derivation of specific algorithm coefficients has been described in Gulukota et al., J. Mol. Biol. 267:1258-126, 1997; (see also Sidney et al., Human Immunol. 45:79-93, 1996; and Southwood et al., J. Immunol. 160:3363-3373, 1998). Briefly, for all i positions, anchor and non-anchor alike, the geometric mean of the average relative binding (ARB) of all peptides carrying j is calculated relative to the remainder of the group, and used as the estimate of jᵢ. For Class II peptides, if multiple alignments are possible, only the highest scoring alignment is utilized, following an iterative procedure. To calculate an algorithm score of a given peptide in a test set, the ARB values corresponding to the sequence of the peptide are multiplied. If this product exceeds a chosen threshold, the peptide is predicted to bind. Appropriate thresholds are chosen as a function of the degree of stringency of prediction desired.

Selection of HLA-A2 Supertype Cross-Reactive Peptides

[0262] Complete protein sequences from nine HIV structural and regulatory proteins were aligned, then scanned, utilizing motif identification software, to identify conserved 9- and 10-mer sequences containing the HLA-A2-supermotif main anchor specificity. The analysis included all isolates in the 1994 Los Alamos database. The conservation criteria varied according to antigen: greater than 80% of clade B lates for gag, pol, env; greater than 70% for nef, rev, tat, vif, vpr; great than 60% for vpu.)

[0263] A total of 233 conserved, HLA-A2 supermotif-positive sequences were identified. The peptides corresponding to the sequences were then synthesized and tested for their capacity to bind purified HLA-A*0201 molecules in vitro (HLA-A*0201 is considered a prototype A2 supertype molecule). Thirty peptides bound A*0201 with IC₅₀ values ≦500 nM; of these 30, 5 bound with high binding affinities (IC₅₀ values ≦50 μM) and 25 bound with intermediate binding affinities, in the 50-500 nM range (Table XXVII).

[0264] The thirty A*0201-binding peptides were subsequently tested for the capacity to bind to additional A2-supertype molecules (A*0202, A*0203, A*0206, and A*6802). As shown in Table XXVII, 20 of the 30 peptides were found to be A2-supertype cross-reactive binders, binding at least 3 of the 5 A2-supertype alleles tested.

Selection of HLA-A3 Supermotif-Bearing Epitopes

[0265] The HIV protein sequences scanned above were also examined for the presence of peptides with the HLA-A3-supermotif primary anchors. A total of 353 conserved 9- or 10-mer motif-containing sequences were identified. The corresponding peptides were synthesized and tested for binding to HLA-A*0301 and HLA-A*1101 molecules, the two most prevalent A3-supertype alleles. Sixty-six of the peptides were found to bind one of the two alleles with binding affinities of ≦500 nM (Table XXVIII). These peptides were then tested for binding cross-reactivity to the other common A3-supertype alleles (A*3101, A*3301, and A*6801). Twenty one of the peptides bound at least three of the five HLA-A3-supertype molecules tested (Table XXVIII). Table XXVIII also includes two 11-mer peptides that were not selected using the search criteria outlined above, but have been shown to be A3-supertype cross-reactive binders.

Selection of HLA-B7 Supermotif Bearing Epitopes

[0266] When the same HIV target antigen protein sequences were also analyzed for the presence of conserved 9- or 10-mer peptides with the HLA-B7-supermotif, 54 sequences were identified. The corresponding peptides were synthesized and tested for binding to HLA-B*0702, the most common B7-supertype allele (i.e., the prototype B7 supertype allele). Sixteen peptides bound B*0702 with IC₅₀ of <500 nM (Table XXIX). These peptides were then tested for binding to other common B7-supertype molecules (B*3501, B*5101, B*5301, and B*5401). As shown in Table XXIX, eight of the sixteen peptides were capable of binding to three or more of the five B7-supertype alleles tested.

Selection of A1 and A24 Motif-Bearing Epitopes

[0267] To further increase population coverage, HLA-A1 and -A24 epitopes can also be incorporated into potential vaccine constructs. An analysis of the protein sequence data from the HIV target antigens utilized above can also be performed to identify HLA-A1- and A24-motif-containing conserved sequences.

[0268] Other similar, but less extensive, studies performed by the present inventors have identified five conserved HIV-derived peptides that bind to A*0101 with an IC₅₀ of 500 nM or less. (Table XXX). In a similar context, 11 conserved HLA-A*2402-binding HIV-derived peptides have also been identified, 5 of which bind with an IC₅₀ of 100 nM or less (Table XXXI).

### Example 3

### Confirmation of Immunogenicity

Evaluation of A*0201 Immunogenicity

[0269] It has been shown that CTL induced in A*0201/K^{b} transgenic mice exhibit specificity similar to CTL induced in the human system (see, e.g., Vitiello et al., J. Exp. Med. 173:1007-1015, 1991; Wentworth et al., Eur. J. Immunol. 26:97-101, 1996). Accordingly, these mice were used to evaluate the immunogenicity of 19 of the 20 A2-supertype cross-reactive peptides identified in Example 2 above.

[0270] CTL induction in transgenic mice following peptide immunization has been described (Vitiello et al., J. Exp. Med. 173:1007-1015, 1991; Alexander et al.; J. Immunol. 159:4753-4761, 1997). In these studies, mice were injected subcutaneously at the base of the tail with each peptide (50 μg/mouse) emulsified in IFA in the presence of an excess of an IA^{b}-restricted helper peptide (140 μg/mouse) (HBV core 128-140, Sette et al., J. Immunol. 153:5586-5592, 1994). Eleven days after injection, splenocytes were incubated in the presence of peptide-loaded syngenic LPS blasts. After six days, cultures were assayed for cytotoxic activity using peptide-pulsed targets. The data, summarized in Table XXXII, indicate that eight peptides were capable of inducing primary CTL responses in A*0201/K^{b} transgenic mice. (For these studies, a peptide was considered positive if it induced CTL (L.U. 30/10⁶ cells ≧2 in at least two transgenic animals (Wentworth et al., Eur. J. Immunol. 26:97-101, 1996).

[0271] The cross-reactive candidate CTL epitopes were also tested for the ability to stimulate recall CTL reponses HIV-infected patients. Briefly, PBMC from patients infected with HIV were cultured in the presence of 10 μg/ml of synthetic peptide. After 7 and 14 days, the cultures were restimulated with peptide. The cultures were assayed for cytolytic activity on day 21 using target cells pulsed with the specific peptide in a ⁵¹Cr release assay. These data are also summarized in Table XXXII. As shown, 15 of the 19 peptides analyzed were recognized in recall CTL responses using PBMC from HIV-infected patients.

[0272] The set of peptides screened for immunogenicity contained two redundant peptides, 1261.14 and 1261.04, which differ in length by a single amino acid. While both peptides exhibit supertype degenerate binding, only the short of the two peptides exhibited immunogenicity. One supertype peptide not tested, 1211.09, has been reported to be recognized by CTL lines isolated from HIV-infected patients. In summary, 16 A2-supertype cross-reactive peptides have been identified that are immungenic in humans; 53% of these peptides are also recognized in HLA-A2 transgenic mice. The sixteen peptides represent epitopes from five HIV antigens: env, gag, pol, vpr, and nef.

Evaluation of A*03/A11 Immunogenicity

[0273] Twenty one of the A3-supertype cross-reactive peptides identified in Example 2 above were evaluated for immunogenicity (Table XXXIII). Peptides were screened using HLA-A11/K^{b} transgenic mice, using the protocol described above for HLA-A2 transgenic mice (Alexander et al., J. Immunol. 159:4753-4761, 1997) and using PBMC obtained from HIV-infected patients to test for the ability to stimulate CTL recall responses. Ten peptides that were capable of inducing CTL in HLA-A11 transgenic mice were identified.

[0274] Three peptides, 966.01, 940.03, and 1069.47, have been shown by collaborators to be immunogenic in HIV-infected patients. Peptides 966.01 and 1069.47 also induced CTL responses in transgenic mice, peptide 940.03 exhibited immunogenicity in patients only.

[0275] In summary, 11 of 23 A3-supertype cross-reactive binding peptides were found to be immunogenic in either HLA-A11 transgenic mice or HIV-infected patients. These peptides represent epitopes from three HIV antigens: pol, env, and nef.

Evaluation of B7 Immunogenicity

[0276] Immunogenicity screening of the B7-supertype cross-reactive binding peptides identified in Example 2 can be evaluated using HLA-B7 transgenic mice and PBMC from in HIV-infected patients in a manner analagous to the evaluation of A2-and A3-supermotif-bearing peptides. Three of these peptides have been previously reported as being immunogenic in HIV-infected patients.

### Example 4

### Implementation of the Extended Supermotif to Improve the Binding Capacity of Native Epitopes by Creating Analogs

[0277] HLA motifs and supermotifs (comprising primary and/or secondary residues) are useful in the identification and preparation of highly cross-reactive native peptides, as demonstrated herein. Moreover, the definition of HLA motifs and supermotifs also allows one to engineer highly cross-reactive epitopes by identifying residues within a native peptide sequence which can be analogued, or “fixed” to confer upon the peptide certain characteristics, e.g. greater cross-reactivity within the group of HLA molecules that comprise a supertype, and/or greater binding affinity for some or all of those HLA molecules. Examples of analog peptides that exhibit modulated binding affinity are set forth in this example.

Analoging at Primary Anchor Residues

[0278] As shown in Example 2, twenty HIV-derived, A2-supertype-restricted epitopes were identified. Peptide engineering strategies are implemented to further increase the cross-reactivity of the candidate epitopes identified above which bind 3/5 of the A2 supertype alleles tested. On the basis of the data disclosed, e.g., in related and co-pending U.S. Ser. No. 09/226,775, the main anchors of A2-supermotif-bearing peptides are altered, for example, to introduce a preferred L, I, V, or M at position 2, and I or V at the C-terminus.

[0279] To analyze the cross-reactivity of the analog peptides, each engineered analog is initially tested for binding to the prototype A2 supertype allele A*0201, then, if A*0201 binding capacity is maintained, for A2-supertype cross-reactivity.

[0280] Alternatively, a peptide may be tested for binding to one or all supertype members and then analogued to modulate binding affinity to any one (or more) of the supertype members to add population coverage.

[0281] Similarly, analogs of HLA-A3 supermotif-bearing epitopes may also be generated. For example, peptides binding to 3/5 of the A3-supertype molecules may be engineered at primary anchor residues to possess a preferred residue (V, S, M, or A) at position 2.

[0282] The analog peptides are then tested for the ability to bind A*03 and A*11 (prototype A3 supertype alleles). Those peptides that demonstrate ≦500 nM binding capacity are then tested for A3-supertype cross-reactivity.

[0283] Similarly to the A2- and A3-motif bearing peptides, peptides binding 3 or more B7-supertype alleles may be improved, where possible, to achieve increased cross-reactive binding. B7 supermotif-bearing peptides may, for example, be engineered to possess a preferred residue (V, I, L, or F) at the C-terminal primary anchor position, as demonstrated by Sidney et al. (J. Immunol. 157:3480-3490, 1996).

Analoging at Secondary Anchor Residues

[0284] Moreover, HLA supermotifs are of value in engineering highly cross-reactive peptides and/or peptides that bind HLA molecules with increased affinity by identifying particular residues at secondary anchor positions that are associated with such properties. For example, the binding capacity of a B7 supermotif-bearing peptide representing a discreet single amino acid substitution at position 1 can be analyzed. A peptide such as t Peptide 1261.01 (Table XXIX), can, for example, be analogued to substitute L for F at position 1 and subsequently be evaluated for increased binding affinity/and or increased cross-reactivity. This procedure will identify analogued peptides with modulated binding affinity.

[0285] Engineered analogs with sufficiently improved binding capacity or cross-reactivity are tested for immunogenicity in HLA-B7-transgenic mice, following for example, IFA immunization or lipopeptide immunization. The analogued peptides may be additionally tested for the ability to stimulate a recall response using PBMC from HIV-infected patients. In conclusion, these data demonstrate that by the use of even single amino acid substitutions, it is possible to increase the binding affinity and/or cross-reactivity of peptide ligands for HLA supertype molecules.

### Example 5

### Identification of HIV-Derived Sequences with HLA-DR Binding Motifs

[0286] Peptide epitopes bearing an HLA class II supermotif or motif may also be identified as outlined below using methodology similar to that described in Examples 1-3.

Selection of HLA-DR-Supermotif-Bearing Epitopes.

[0287] To identify HIV-derived, HLA class II HTL epitopes, the protein sequences from the same HIV antigens used for the identification of HLA Class I supermotif/motif sequences were analyzed for the presence of sequences bearing an HLA-DR-motif or supermotif. Specifically, 15-mer sequences were selected comprising a DR-supermotif, further comprising a 9-mer core, and three-residue N- and C-terminal flanking regions (15 amino acids total).

[0288] Protocols for predicting peptide binding to DR molecules have been developed (Southwood et al., J. Immunol. 160:3363-3373, 1998). These protocols, specific for individual DR molecules, allow the scoring, and ranking, of 9-mer core regions. Each protocol not only scores peptide sequences for the presence of DR-supermotif primary anchors (i.e., at position I and position 6) within a 9-mer core, but additionally evaluates sequences for the presence of secondary anchors [symbol] Using allele specific selection tables (see, e.g., Southwood et al., ibid.), it has been found that these protocols efficiently select peptide sequences with a high probability of binding a particular DR molecule. Additionally, it has been found that performing these protocols in tandem, specifically those for DR1, DR4w4, and DR7, can efficiently select DR cross-reactive peptides. The HIV-derived peptides identified above were tested for their binding capacity for various common HLA-DR molecules. All peptides were initially tested for binding to the DR molecules in the primary panel: DR1, DR4w4, and DR7. Peptides binding at least 2 of these 3 DR molecules were then tested for binding to DR2w2 β1, DR2w2 β2, DR6w19, and DR9 molecules in secondary assays. Finally, peptides binding at least 2 of the 4 secondary panel DR molecules, and thus cumulatively at least 4 of 7 different DR molecules, were screened for binding to DR4w15, DR5w11, and DR8w2 molecules in tertiary assays. Peptides binding at least 7 of the 10 DR molecules comprising the primary, secondary, and tertiary screening assays were considered cross-reactive DR binders. The composition of these screening panels, and the phenotypic frequency of associated antigens, are shown in Table XXXIV.

[0289] Thirteen HIV-derived peptides were found to bind at least 7 of 10 common HLA-DR alleles. The sequence of these 13 peptides, and their binding capacity for each assay in the primary through tertiary panels, are shown in Table XXXV. This set of peptide epitopes is predominantly derived from pol, but also includes epitopes from gag and env.

Selection of DR3 Motif Peptides

[0290] Because HLA-DR3 is an allele that is prevalent in Caucasian, Black, and Hispanic populations, DR3 binding capacity is an important criterion in the selection of HTL epitopes. However, data generated previously indicated that DR3 only rarely cross-reacts with other DR alleles (Sidney et al., J. Immunol. 149:2634-2640, 1992; Geluk et al., J. Immunol. 152:5742-5748, 1994; Southwood et al., J. Immunol. 160:3363-3373, 1998). This is not entirely surprising in that the DR3 peptide-binding motif appears to be distinct from the specificity of most other DR alleles. For maximum efficiency in developing vaccine candidates it would be desirable for DR3 motifs to be clustered in proximity with DR supermotif regions. Thus, peptides shown to be candidates may also be assayed for their DR3 binding capacity. However, in view of the distinct binding specifity of the DR3 motif, peptides binding only to DR3 can also be ocnsidered as candidates for inclusion in a vaccine formulation.

[0291] To efficiently identify peptides that bind DR3, the nine target HIV antigens were analyzed for conserved sequences carrying one of the two DR3 specific binding motifs reported by Geluk et al. (J. Immunol. 152:5742-5748, 1994). The corresponding peptides were then synthesized and tested for the ability to bind DR3 with an affinity of IPM or better, i.e., less than 1 μM. ive peptides were found that met this binding criterion (Table XXXVI), and thereby qualify as HLA class II high affinity binders. Of these five, four represent epitopes from pol, and one is from vpu.

[0292] DR3 binding epitopes identified in this manner may then be included in vaccine compositions with DR supermotif-bearing peptide epitopes.

### Example 6

### Immunogenicity of HIV-Derived HTL Epitopes

[0293] Immunogenicity of HTL epitopes can be evaluated in a manner analagous to the determination of immunogenicity of CTL epitopes using appropriate transgenic mice models and/or assessing the ability to stimulate recall responses using PBMC isolated from HIV-infected individuals.

[0294] The immunogenicity of 11 of the 13 HLA class II DR-supermotif binding epitopes identified in Example 5 was evaluated in a study testing PBMC isolated from HIV-infected individuals for recall proliferative responses. All eleven of these peptides were found to stimulate DR-restricted proliferative responses (Table XXXVII).

[0295] The DR3-motif bearing peptides can also be evaluated in a similar manner. Such studies demonstrate the immunogenicity of class II epitopes derived from HIV proteins.

### Example 7

### Calculation of Phenotypic Frequencies of HLA-Supertypes in Various Ethnic Backgrounds to Determine Breadth of Population Coverage

[0296] This example illustrates the assessment of the breadth of population coverage of a vaccine composition comprised of multiple epitopes comprising multiple supermotifs and/or motifs.

[0297] In order to analyze population coverage, gene frequencies of HLA alleles were determined. Gene frequencies for each HLA allele were calculated from antigen or allele frequencies utilizing the binomial distribution formulae gf=1-(SQRT(1-af)) (see, e.g., Sidney et al., Human Immunol. 45:79-93, 1996). To obtain overall phenotypic frequencies, cumulative gene frequencies were calculated, and the cumulative antigen frequencies derived by the use of the inverse formula [af=1-(1-Cgf)²].

[0298] Where frequency data was not available at the level of DNA typing, correspondence to the serologically defined antigen frequencies was assumed. To obtain total potential supertype population coverage no linkage disequilibrium was assumed, and only alleles confirmed to belong to each of the supertypes were included (minimal estimates). Estimates of total potential coverage achieved by inter-loci combinations were made by adding to the A coverage the proportion of the non-A covered population that could be expected to be covered by the B alleles considered (e.g., total=A+B*(1-A)). Confirmed members of the A3-like supertype are A3, A11, A31, A*3301, and A*6801. Although the A3-like supertype may also include A34, A66, and A*7401, these alleles were not included in overall frequency calculations. Likewise, confirmed members of the A2-like supertype family are A*0201, A*0202, A*0203, A*0204, A*0205, A*0206, A*0207, A*6802, and A*6901. Finally, the B7-like supertype-confirmed alleles are: B7, B*3501-03, B51, B*5301, B*5401, B*5501-2, B*5601, B*6701, and B*7801 (potentially also B*1401, B*3504-06, B*4201, and B*5602).

[0299] Population coverage achieved by combining the A2-, A3- and B7-supertypes is approximately 86% in five major ethnic groups (see Table XXI). Coverage may be extended by including peptides bearing the A1 and A24 motifs. On average, A1 is present in 12% and A24 in 29% of the population across five different major ethnic groups (Caucasian, North American Black, Chinese, Japanese, and Hispanic). Together, these alleles are represented with an average frequency of 39% in these same ethnic populations. The total coverage across the major ethnicities when A1 and A24 are combined with the coverage of the A2-, A3- and B7-supertype alleles is >95%. An analagous approach can be used to estimate population coverage achieved with combinations of class II motif-bearing epitopes.

Summary of Candidate HLA class I Epitopes

[0300] In summary, on the basis of the data presented in the above examples, 47 candidate CTL peptide epitopes derived from HIV have been identified (see, Table XXXVIII). Of these 47 eptiopes, 6 are derived from gag, 22 from pol, 10 from env, 3 from nef, and one epitope each from rev, vif, and vpr. This set of epitopes includes 16 HLA-A2 supermotif-bearing epitopes (two from gag, eight from pol, three from env, two from vpr, and one from nef), all of which are recognized in HIV-infected patients. The 10 HLA-A3 supermotif-bearing candidate epitopes include 6 pol-derived epitopes, two env-derived epitopes and one eptiope each from gag, vif, and nef. With the exception of peptides 1273.08 and 1273.03, all of the epitopes are immunogenic in HLA transgenic mice. The two additional peptides are included to enhance antigen diversity.

[0301] The CTL candidate epitope set also includes 8 B7-restricted peptides. Of these eight, 3 epitopes have been reported as immunogenic in patients. Five B7-supermotif-bearing peptides were included as candidates based on supertype binding. Immunogenicity studies in humans (e.g., Bertoni et al., J. Clin. Invest. 100:503, 1997; Doolan et al., Immunity 7:97, 1997; and Threlkeld et al., J. Immunol. 159:1648, 1997) have shown that highly cross-reactive binding peptides are almost always recognized as epitopes. Given these results, and in view of the limited immunogenicity data available for B7 supermotif-bearing peptides, the use of B7-supertype binding affinity is an important selection criterion in identifying candidate epitopes for inclusion in a vaccine that is immunogenic in a diverse population.

[0302] Similarly, A1- and A24-restricted peptides were included on the basis of both demonstrated immunogenicity of the candidate epitopes and on the basis of binding affinity. Five of the candidate epitopes have been reported to be recognized in recall CTL repsonses form HIV-infected patients. Because a high percentage of the peptides with binding affinities ≦100 nM are found to be immunogenic, four A24-restricted peptides were included as vaccine candidates. An additional five A24-restricted epitopes and four A1-restricted epitopes that bound their respective alleles with an IC₅₀ of <500 nM were also included to provide a greater degree of population coverage.

[0303] With these 47 CTL epitopes (as disclosed herein and from the art), an average population coverage is predicted to be greater than 95% in each of five major ethnic populations. Using the game theory Monte Carlo simulation analysis, which is known in the art (see e.g., Osborne, M. J. and Rubinstein, A. “A course in game theory” MIT Press, 1994), it is estimated that 90% of the individuals in a population comprised of the Caucasian, North American Black, Japanese, Chinese, and Hispanic ethnic groups would recognize 7 or more of the vaccine epitopes described herein (FIG. 1)

Summary of Candidate HLA class II Epitopes

[0304] A list of HIV-derived HTL epitopes that would be preferred for use in the design of minigene constructs or other vaccine formulations is summarized in Table XXXIX. The set of HTL epitopes includes 13 DR supermotif-bearing peptides and 5 DR3 motif-bearing peptides. The majority of the epitopes are derived from pol, 3 are from gag, 2 are from env and one is derived from vpu. The total estimated population coverage represented by this panel of HTL epitopes is estimated to be greater than 91% in each of five major ethnic groups (Table XL).

### Example 8

### CTL Recognition Of Endogenous Processed Antigens After Priming

[0305] This example determines that CTL induced by native or analogued peptide epitopes identified and selected as described in Examples 1-6 recognize endogenously synthesized, i.e., native antigens.

[0306] Effector cells isolated from transgenic mice that are immunized with peptide epitopes as in Example 3, for example HLA-A2 supermotif-bearing epitopes, are re-stimulated in vitro using peptide-coated stimulator cells. Six days later, effector cells are assayed for cytotoxicity and the cell lines that contain peptide-specific cytotoxic activity are further re-stimulated. An additional six days later, these cell lines are tested for cytotoxic activity on ⁵¹Cr labeled Jurkat-A2.1/K^{b} target cells in the absence or presence of peptide, and also tested on ⁵¹Cr labeled target cells bearing the endogenously synthesized antigen, i.e. cells that are stably transfected with HIV expression vectors.

[0307] The result will demonstrate that CTL lines obtained from animals primed with peptide epitope recognize endogenously synthesized HIV antigen. The choice of transgenic mouse model to be used for such an analysis depends upon the epitope(s) that is being evaluated. In addition to HLA-A*0201/K^{b} transgenic mice, several other transgenic mouse models including mice with human A11, which may also be used to evaluate A3 epitopes, and B7 alleles have been characterized and others (e.g., transgenic mice for HLA-A1 and A24) are being developed. HLA-DR1 and HLA-DR3 mouse models have also been developed, which may be used to evaluate HTL epitopes.

### Example 9

### Activity of CTL-HTL Conjugated Epitopes in Transgenic Mice

[0308] This example illustrates the induction of CTLs and HTLs in transgenic mice by use of a HIV CTL/HTL peptide conjugate whereby the vaccine composition comprises peptides administered to an HIV-infected patient or an individual at risk for HIV. The peptide composition can comprise multiple CTL and/or HTL epitopes. This analysis demonstrates enhanced immunogenicity that can be achieved by inclusion of one or more HTL epitopes in a vaccine composition. Such a peptide composition can comprise a lipidated HTL epitope conjugated to a preferred CTL epitope containing, for example, at least one CTL epitope selected from Table XXVI-XXIX, or an analog of that epitope. The HTL epitope is, for example, selected from Table XXXII.

[0309] Lipopeptide preparation: Lipopeptides are prepared by coupling the appropriate fatty acid to the amino terminus of the resin bound peptide. A typical procedure is as follows: A dichloromethane solution of a four-fold excess of a pre-formed symmetrical anhydride of the appropriate fatty acid is added to the resin and the mixture is allowed to react for two hours. The resin is washed with dichloromethane and dried. The resin is then treated with trifluoroacetic acid in the presence of appropriate scavengers [e.g. 5% (v/v) water] for 60 minutes at 20° C. After evaporation of excess trifluoroacetic acid, the crude peptide is washed with diethyl ether, dissolved in methanol and precipitated by the addition of water. The peptide is collected by filtration and dried.

[0310] Immunization procedures: Immunization of transgenic mice is performed as described (Alexander et al., J. Immunol. 159:4753-4761, 1997). For example, A2/Kb mice, which are transgenic for the human HLA A2.1 allele and are useful for the assessment of the immunogenicity of HLA-A*0201 motif- or HLA-A2 supermotif-bearing epitopes, are primed subcutaneously (base of the tail) with 0.1 ml of peptide conjugate formulated in saline, or DMSO/saline. Seven days after priming, splenocytes obtained from these animals are restimulated with syngenic irradiated LPS-activated lymphoblasts coated with peptide.

[0311] Cell lines: Target cells for peptide-specific cytotoxicity assays are Jurkat cells transfected with the HLA-A2.1/K^{b} chimeric gene (e.g., Vitiello et al., J. Exp. Med. 173:1007, 1991)

[0312] In vitro CTL activation: One week after priming, spleen cells (30×10⁶ cells/flask) are co-cultured at 37° C. with syngeneic, irradiated (3000 rads), peptide coated lymphoblasts (10×10” cells/flask) in 10 ml of culture medium/T25 flask. After six days, effector cells are harvested and assayed for cytotoxic activity.

[0313] Assay for cytotoxic activity: Target cells (1.0 to 1.5×10⁶) are incubated at 37° C. in the presence of 200 μl, of ⁵¹Cr. After 60 minutes, cells are washed three times and resuspended in R10 medium. Peptide is added where required at a concentration of 1 μg/ml. For the assay, 10⁴ ⁵¹Cr-labeled target cells are added to different concentrations of effector cells (final volume of 200 μl) in U-bottom 96-well plates. After a 6 hour incubation period at 37° C., a 0.1 ml aliquot of supernatant is removed from each well and radioactivity is determined in a Micromedic automatic gamma counter. The percent specific lysis is determined by the formula: percent specific release=100×(experimental release−spontaneous release)/(maximum release−spontaneous release). To facilitate comparison between separate CTL assays run under the same conditions, % ⁵¹Cr release data is expressed as lytic units/10⁶ cells. One lytic unit is arbitrarily defined as the number of effector cells required to achieve 30% lysis of 10,000 target cells in a 6 hour ⁵¹Cr release assay. To obtain specific lytic units/10⁶, the lytic units/10⁶ obtained in the absence of peptide is subtracted from the lytic units/I 10⁶ obtained in the presence of peptide. For example, if 30% ⁵¹Cr release is obtained at the effector (E): target (T) ratio of 50:1 (i.e., 5×10⁵ effector cells for 10,000 targets) in the absence of peptide and 5:1 (i.e., 5×10⁴ effector cells for 10,000 targets) in the presence of peptide, the specific lytic units would be: [(1/50,000)-(1/500,000)]×10⁶=18 LU.

[0314] The results are analyzed to assess the magnitude of the CTL responses of animals injected with the immunogenic CTL/HTL conjugate vaccine preparation and are compared to the magnitude of the CTL response achieved using the CTL epitope as outlined in Example 3. Analyses similar to this may be performed to evaluate the immunogenicity of peptide conjugates containing multiple CTL epitopes and/or multiple HTL epitopes. In accordance with these procedures it is found that a CTL response is induced, and concomitantly that an HTL response is induced upon administration of such compositions.

### Example 10

### Selection of CTL and HTL Epitopes for Inclusion in an HIV-Specific Vaccine

[0315] This example illustrates the procedure for the selection of peptide epitopes for vaccine compositions of the invention. The peptides in the composition may be in the form of a nucleic acid sequence, either single or one or more sequences (i.e., minigene) that encodes peptide(s), or may be single and/or polyepitopic peptides.

[0316] The following principles are utilized when selecting an array of epitopes for inclusion in a vaccine composition. Each of the following principles are balanced in order to make the selection.

[0317] 1.) Epitopes are selected which, upon administration, mimic immune responses that have been observed to be correlated with HIV clearance. For HLA Class I this includes 3-4 epitopes that come from at least one antigen of HIV. In other words, it has been observed that patients who spontaneously clear HIV generate an immune response to at least 3 epitopes on at least one HIV antigen. For HLA Class II a similar rationale is employed; again 3-4 epitopes are selected from at least one HIV antigen.

[0318] 2.) Epitopes are selected that have the requisite binding affinity established to be correlated with immunogenicity: for HLA Class I an IC₅₀ of 500 nM or less, or for Class II an IC₅₀ of 1000 nM or less.

[0319] 3.) Sufficient supermotif bearing peptides, or a sufficient array of allele-specific motif bearing peptides, are selected to give broad population coverage. For example, epitopes are selected to provide at least 80% population coverage. A Monte Carlo analysis, a statistical evaluation known in the art and discussed herein, can be employed to assess breadth, or redundancy, of population coverage.

[0320] 4.) When selecting epitopes for HIV antigens it may be preferable to select native epitopes. Therefore, of particular relevance for infectious disease vaccines, are epitopes referred to as “nested epitopes.” Nested epitopes occur where at least two epitopes overlap in a given peptide sequence. A peptide comprising “transcendent nested epitopes” is a peptide that has both HLA class I and HLA class II epitopes in it.

[0321] When providing nested epitopes, a sequence that has the greatest number of epitopes per provided sequence is provided. A limitation on this principle is to avoid providing a peptide that is any longer than the amino terminus of the amino terminal epitope and the carboxyl terminus of the carboxyl terminal epitope in the peptide. When providing a longer peptide sequence, such as a sequence comprising nested epitopes, the sequence is screened in order to insure that it does not have pathological or other deleterious biological properties.

[0322] 5.) When creating a minigene, as disclosed in greater detail in Example 11, an objective is to generate the smallest peptide possible that encompasses the epitopes of interest. The principles employed are similar, if not the same as those employed when selecting a peptide comprising nested epitopes. Additionally, however, upon determination of the nucleic acid sequence to be provided as a minigene, the peptide encoded thereby is analyzed to determine whether any “junctional epitopes” have been created. A junctional epitope is an actual binding epitope, as predicted, e.g., by motif analysis. Junctional epitopes are generally to be avoided because the recipient may generate an immune response to that epitope, which is not present in a native HIV protein sequence. Of particular concern is a junctional epitope that is a “dominant epitope.” A dominant epitope may lead to such a zealous response that immune responses to other epitopes are diminished or suppressed.

[0323] Peptide epitopes for inclusion in vaccine compositions are, for example, selected from those listed in Tables XXVI-XXIX and Table XXXII. A vaccine composition comprised of selected peptides, when administered, is safe, efficacious, and elicits an immune response similar in magnitude of an immune response that clears an acute HIV infection.

### Example 11

### Construction of Minigene Multi-Epitope DNA Plasmids

[0324] This example provides general guidance for the construction of a minigene expression plasmid. Minigene plasmids may, of course, contain various configurations of CTL and/or HTL epitopes or epitope analogs as described herein. Expression plasmids have been constructed and evaluated as described, for example, in co-pending U.S. Ser. No. 09/311,784 filed May 13, 1999 and in Ishioka et al., J. Immunol. 162:3915-3925, 1999. An example of such a plasmid for the expression of HIV epitopes is shown in FIG. 2, which illustrates the orientation of HIV peptide epitopes in a minigene construct.

[0325] A minigene expression plasmid may include multiple CTL and HTL peptide epitopes. In the present example, HLA-A2, -A3, -B7 supermotif-bearing peptide epitopes and HLA-A1 and -A24 motif-bearing peptide epitopes are used in conjunction with DR supermotif-bearing epitopes and/or DR3 epitopes (FIG. 2). Preferred epitopes are identified, for example, in Tables XXVI-XXIX and XXXII. HLA class I supermotif or motif-bearing peptide epitopes derived from multiple HIV antigens, are selected such that multiple supermotifs/motifs are represented to ensure broad population coverage. Similarly, HLA class II epitopes are selected from multiple HIV antigens to provide broad population coverage, i.e. both HLA DR-1-4-7 supermotif-bearing epitopes and HLA DR-3 motif-bearing epitopes are selected for inclusion in the minigene construct. The selected CTL and HTL epitopes are then incorporated into a minigene for expression in an expression vector.

[0326] Such a construct may additionally include sequences that direct the HTL epitopes to the endoplasmic reticulum. For example, the Ii protein may be fused to one or more HTL epitopes as described in co-pending application U.S. Ser. No. 09/311,784 filed May 13, 1999, wherein the CLIP sequence of the Ii protein is removed and replaced with an HLA class II epitope sequence os that HLA class II epitope is directed to the endoplasmic reticulum, where the epitope binds to an HLA class II molecules.

[0327] This example illustrates the methods to be used for construction of a minigene-bearing expression plasmid. Other expression vectors that may be used for minigene compositions are available and known to those of skill in the art.

[0328] The minigene DNA plasmid contains a consensus Kozak sequence and a consensus murine kappa Ig-light chain signal sequence followed by CTL and/or HTL epitopes selected in accordance with principles disclosed herein. The construct can also include, for example, The sequence encodes an open reading frame fused to the Myc and His antibody epitope tag coded for by the pcDNA 3.1 Myc-His vector.

[0329] Overlapping oligonucleotides, for example eight oligonucleotides, averaging approximately 70 nucleotides in length with 15 nucleotide overlaps, are synthesized and HPLC-purified. The oligonucleotides encode the selected peptide epitopes as well as appropriate linker nucleotides, Kozak sequence, and signal sequence. The final multiepitope minigene is assembled by extending the overlapping oligonucleotides in three sets of reactions using PCR. A Perkin/Elmer 9600 PCR machine is used and a total of 30 cycles are performed using the following conditions: 95° C. for 15 sec, annealing temperature (5° below the lowest calculated Tₘ of each primer pair) for 30 sec, and 72° C. for 1 min.

[0330] For the first PCR reaction, 5 μg of each of two oligonucleotides are annealed and extended: Oligonucleotides 1+2, 3+4, 5+6, and 7+8 are combined in 100 μl reactions containing Pfu polymerase buffer (1×=10 mM KCL, 10 mM (NH₄)₂SO₄, 20 mM Tris-chloride, pH 8.75, 2 mM MgSO₄, 0.1% Triton X-100, 100 μg/ml BSA), 0.25 mM each dNTP, and 2.5 U of Pfu polymerase. The full-length dimer products are gel-purified, and two reactions containing the product of 1+2 and 3+4, and the product of 5+6 and 7+8 are mixed, annealed, and extended for 10 cycles. Half of the two reactions are then mixed, and 5 cycles of annealing and extension carried out before flanking primers are added to amplify the full length product for 25 additional cycles. The full-length product is gel-purified and cloned into pCR-blunt (Invitrogen) and individual clones are screened by sequencing.

### Example 12

### The Plasmid Construct and the Degree to Which it Induces Immunogenicity

[0331] The degree to which the plasmid construct prepared using the methodology outlined in Example 11 is able to induce immunogenicity is evaluated through in vivo injections into mice and subsequent in vitro assessment of CTL and HTL activity, which are analysed using cytotoxicity and proliferation assays, respectively, as detailed e.g., in U.S. Ser. No. 09/311,784 filed May 13, 1999 and Alexander et al., Immunity 1:751-761, 1994. To assess the capacity of the pMin minigene construct to induce CTLs in vivo, HLA-A11/K^{b} transgenic mice, for example, are immunized intramuscularly with 100 μg of naked cDNA. As a means of comparing the level of CTLs induced by cDNA immunization, a control group of animals is also immunized with an actual peptide composition that comprises multiple epitopes synthesized as a single polypeptide as they would be encoded by the minigene.

[0332] Splenocytes from immunized animals are stimulated twice with each of the respective compositions (peptide epitopes encoded in the minigene or the polyepitopic peptide), then assayed for peptide-specific cytotoxic activity in a ⁵¹Cr release assay. The results indicate the magnitude of the CTL response directed against the A3-restricted epitope, thus indicating the in vivo immunogenicity of the minigene vaccine and polyepitopic vaccine. It is, therefore, found that the minigene elicits immune responses directed toward the HLA-A3 supermotif peptide epitopes as does the polyepitopic peptide vaccine. A similar analysis is also performed using other HLA-A2 and HLA-B7 transgenic mouse models to assess CTL induction by HLA-A2 and HLA-B7 motif or supermotif epitopes.

[0333] To assess the capacity of a class II epitope encoding minigene to induce HTLs in vivo, I-A^{b} restricted mice, for example, are immunized intramuscularly with 100 μg of plasmid DNA. As a means of comparing the level of HTLs induced by DNA immunization, a group of control animals is also immunized with an actual peptide composition emulsified in complete Freund's adjuvant.

[0334] CD4+ T cells, i.e. HTLs, are purified from splenocytes of immunized animals and stimulated with each of the respective compositions (peptides encoded in the minigene). The HTL response is measured using a ³H-thymidine incorporation proliferation assay, (see, e.g., Alexander et al. Immunity 1:751-761, 1994). the results indicate the magnitude of the HTL response, thus demonstrating the in vivo immunogenicity of the minigene.

[0335] DNA minigenes, constructed as described in Example 11, may also be evaluated as a vaccine in combination with a boosting agent using a prime boost protocol. The boosting agent may consist of recombinant protein (e.g., Barnett et al., Aids Res. and Human Reotroviruses 14, Supplement 3:S299-S309, 1998) or recombinant vaccinia, for example, expressing a minigene or DNA encoding the complete protein of interest (see, e.g., Hanke et al., Vaccine 16:439-445, 1998; Sedegah et al., Proc. Natl. Acad. Sci USA 95:7648-53, 1998; Hanke and McMichael, Immunol. Letters 66:177-181, 1999; and Robinson et al., Nature Med. 5:526-34, 1999).

[0336] For example, the efficacy of the DNA minigene may be evaluated in transgenic mice. In this example, A2.1/K^{b} transgenic mice are immunized IM with 100 μg of the DNA minigene encoding the immunogenic peptides. After an incubation period (ranging from 3-9 weeks), the mice are boosted IP with 10⁷ pfui/mouse of a recombinant vaccinia virus expressing the same sequence encoded by the DNA minigene. Control mice are immunized with 100 μg of DNA or recombinant vaccinia without the minigene sequence, or with DNA encoding the minigene, but without the vaccinia boost. After an additional incubation period of two weeks, splenocytes from the mice are immediately assayed for peptide-specific activity in an ELISPOT assay. Additionally, splenocytes are stimulated in vitro with the A2-restricted peptide epitopes encoded in the minigene and recombinant vaccinia, then assayed for peptide-specific activity in an IFN-γ ELISA. It is found that the minigene utilized in a prime-boost mode elicits greater immune responses toward the HLA-A2 supermotif peptides than with DNA alone. Such an analysis is also performed using other HLA-A11 and HLA-B7 transgenic mouse models to assess CTL induction by HLA-A3 and HLA-B7 motif or supermotif epitopes.

### Example 13

### Peptide Composition for Prophylactic Uses

[0337] Vaccine compositions of the present invention are used to prevent HIV infection in persons who are at risk for such infection. For example, a polyepitopic peptide epitope composition (or a nucleic acid comprising the same) containing multiple CTL and HTL epitopes such as those selected in Examples 9 and/or 10, which are also selected to target greater than 80% of the population, is administered to individuals at risk for HIV infection. The composition is provided as a single lipidated polypeptide that encompasses multiple epitopes. The vaccine is administered in an aqueous carrier comprised of Freunds Incomplete Adjuvant. The dose of peptide for the initial immunization is from about 1 to about 50,000 μg, generally 100-5,000 μg, for a 70 kg patient. The initial administration of vaccine is followed by booster dosages at 4 weeks followed by evaluation of the magnitude of the immune response in the patient, by techniques that determine the presence of epitope-specific CTL populations in a PBMC sample. Additional booster doses are administered as required. The composition is found to be both safe and efficacious as a prophylaxis against HIV infection.

[0338] Alternatively, the polyepitopic peptide composition can be administered as a nucleic acid in accordance with methodologies known in the art and disclosed herein.

### Example 14

### Polyepitopic Vaccine Compositions Derived from Native HIV Sequences

[0339] A native HIV polyprotein sequence is screened, preferably using computer algorithms defined for each class I and/or class II supermotif or motif, to identify “relatively short” regions of the polyprotein that comprise multiple epitopes and is preferably less in length than an entire native antigen. This relatively short sequence that contains multiple distinct, even overlapping, epitopes is selected and used to generate a minigene construct. The construct is engineered to express the peptide, which corresponds to the native protein sequence. The “relatively short” peptide is generally less than 250 amino acids in length, often less than 100 amino acids in length, preferably less than 75 amino acids in length, and more preferably less than 50 amino acids in length. The protein sequence of the vaccine composition is selected because it has maximal number of epitopes contained within the sequence, i.e., it has a high concentration of epitopes. As noted herein, epitope motifs may be nested or overlapping (i.e., frame shifted relative to one another). For example, with frame shifted overlapping epitopes, two 9-mer epitopes and one 10-mer epitope can be present in a 10 amino acid peptide. Such a vaccine composition is administered for therapeutic or prophylactic purposes.

[0340] The vaccine composition will preferably include, for example, three CTL epitopes and at least one HTL epitope from HIV. This polyepitopic native sequence is administered either as a peptide or as a nucleic acid sequence which encodes the peptide. Alternatively, an analog can be made of this native sequence, whereby one or more of the epitopes comprise substitutions that alter the cross-reactivity and/or binding affinity properties of the polyepitopic peptide.

[0341] The embodiment of this example provides for the possibility that an as yet undiscovered aspect of immune system processing will apply to the native nested sequence and thereby facilitate the production of therapeutic or prophylactic immune response-inducing vaccine compositions. Additionally such an embodiment provides for the possibility of motif-bearing epitopes for an HLA makeup that is presently unknown. Furthermore, this embodiment (absent analogs) directs the immune response to multiple peptide sequences that are actually present in native HIV antigens thus avoiding the need to evaluate any junctional epitopes. Lastly, the embodiment provides an economy of scale when producing nucleic acid vaccine compositions.

[0342] Related to this embodiment, computer programs can be derived in accordance with principles in the art, which identify in a target sequence, the greatest number of epitopes per sequence length.

### Example 15

### Polyepitopic Vaccine Compositions Directed To Multiple Diseases

[0343] The HIV peptide epitopes of the present invention are used in conjunction with peptide epitopes from target antigens related to one or more other diseases, to create a vaccine composition that is useful for the prevention or treatment of HIV as well as the one or more other disease(s). Examples of the other diseases include, but are not limited to, HCV and HBV.

[0344] For example, a polyepitopic peptide composition comprising multiple CTL and HTL epitopes that target greater than 98% of the population may be created for administration to individuals at risk for both HBV and HIV infection. The composition can be provided as a single polypeptide that incorporates the multiple epitopes from the various disease-associated sources, or can be administered as a composition comprising one or more discrete epitopes.

### Example 16

### Use of Peptides to Evaluate an Immune Response

[0345] Peptides of the invention may be used to analyze an immune response for the presence of specific CTL or HTL populations directed to HIV. Such an analysis may be performed in a manner as that described by Ogg et al., Science 279:2103-2106, 1998. In the following example, peptides in accordance with the invention are used as a reagent for diagnostic or prognostic purposes, not as an immunogen.

[0346] In this example highly sensitive human leukocyte antigen tetrameric complexes (“tetramers”) are used for a cross-sectional analysis of, for example, HIV HLA-A*0201-specific CTL frequencies from HLA A*0201-positive individuals at different stages of infection or following immunization using an HIV peptide containing an A*0201 motif. Tetrameric complexes are synthesized as described (Musey et al., N. Engl. J. Med. 337:1267, 1997). Briefly, purified HLA heavy chain (A*0201 in this example) and P2-microglobulin are synthesized by means of a prokaryotic expression system. The heavy chain is modified by deletion of the transmembrane-cytosolic tail and COOH-terminal addition of a sequence containing a BirA enzymatic biotinylation site. The heavy chain, P2-microglobulin, and peptide are refolded by dilution. The 45-kD refolded product is isolated by fast protein liquid chromatography and then biotinylated by BirA in the presence of biotin (Sigma, St. Louis, Mo.), adenosine 5′triphosphate and magnesium. Streptavidin-phycoerythrin conjugate is added in a 1:4 molar ratio, and the tetrameric product is concentrated to 1 mg/ml. The resulting product is referred to as tetramer-phycoerythrin.

[0347] For the analysis of patient blood samples, approximately one million PBMCs are centrifuged at 300 g for 5 minutes and resuspended in 50 μl of cold phosphate-buffered saline. Tri-color analysis is performed with the tetramer-phycoerythrin, along with anti-CD8-Tricolor, and anti-CD38. The PBMCs are incubated with tetramer and antibodies on ice for 30 to 60 min and then washed twice before formaldehyde fixation. Gates are applied to contain >99.98% of control samples. Controls for the tetramers include both A*0201-negative individuals and A*0201-positive uninfected donors. The percentage of cells stained with the tetramer is then determined by flow cytometry. The results indicate the number of cells in the PBMC sample that contain epitope-restricted CTLs, thereby readily indicating the extent of immune response to the HIV epitope, and thus the stage of infection with HIV, the status of exposure to HIV, or exposure to a vaccine that elicits a protective or therapeutic response.

### Example 17

### Use of Peptide Epitopes to Evaluate Recall Responses

[0348] The peptide epitopes of the invention are used as reagents to evaluate T cell responses, such as acute or recall responses, in patients. Such an analysis may be performed on patients who have recovered from infection, who are chronically infected with HIV, or who have been vaccinated with an HIV vaccine.

[0349] For example, the class I restricted CTL response of persons who have been vaccinated may be analyzed. The vaccine may be any HIV vaccine. PBMC are collected from vaccinated individuals and HLA typed. Appropriate peptide epitopes of the invention that, optimally, bear supermotifs to provide cross-reactivity with multiple HLA supertype family members, are then used for analysis of samples derived from individuals who bear that HLA type.

[0350] PBMC from vaccinated individuals are separated on Ficoll-Histopaque density gradients (Sigma Chemical Co., St. Louis, Mo.), washed three times in HBSS (GIBCO Laboratories), resuspended in RPMI-1640 (GIBCO Laboratories) supplemented with L-glutamine (2 mM), penicillin (50 U/ml), streptomycin (50 μg/ml), and Hepes (10 mM) containing 10% heat-inactivated human AB serum (complete RPMI) and plated using microculture formats. A synthetic peptide comprising an epitope of the invention is added at 10 μg/ml to each well and HBV core 128-140 epitope is added at 1 μg/ml to each well as a source of T cell help during the first week of stimulation.

[0351] In the microculture format, 4×10⁵ PBMC are stimulated with peptide in 8 replicate cultures in 96-well round bottom plate in 100 l/well of complete RPMI. On days 3 and 10, 100 ml of complete RPMI and 20 U/ml final concentration of rIL-2 are added to each well. On day 7 the cultures are transferred into a 96-well flat-bottom plate and restimulated with peptide, rIL-2 and 10⁵ irradiated (3,000 rad) autologous feeder cells. The cultures are tested for cytotoxic activity on day 14. A positive CTL response requires two or more of the eight replicate cultures to display greater than 10% specific ⁵¹Cr release, based on comparison with uninfected control subjects as previously described (Rehermann, et al., Nature Med. 2:1104,1108, 1996; Rehermann et al, J. Clin. Invest. 97:1655-1665, 1996; and Rehermann et al. J. Clin. Invest. 98:1432-1440, 1996).

[0352] Target cell lines are autologous and allogeneic EBV-transformed B-LCL that are either purchased from the American Society for Histocompatibility and Immunogenetics (ASHI, Boston, Mass.) or established from the pool of patients as described (Guilhot, et al. J. Virol. 66:2670-2678, 1992).

[0353] Cytotoxicity assays are performed in the following manner. Target cells consist of either allogeneic HLA-matched or autologous EBV-transformed B lymphoblastoid cell line that are incubated overnight with the synthetic peptide epitope of the invention at 10 μM, and labeled with 100 μCi of ⁵¹Cr (Amersham Corp., Arlington Heights, Ill.) for 1 hour after which they are washed four times with HBSS.

[0354] Cytolytic activity is determined in a standard 4-h, split well ⁵¹Cr release assay using U-bottomed 96 well plates containing 3,000 targets/well. Stimulated PBMC are tested at effector/target (E/T) ratios of 20-50:1 on day 14. Percent cytotoxicity is determined from the formula: 100×[(experimental release-spontaneous release)/maximum release-spontaneous release)]. Maximum release is determined by lysis of targets by detergent (2% Triton X-100; Sigma Chemical Co., St. Louis, Mo.). Spontaneous release is <25% of maximum release for all experiments.

[0355] The results of such an analysis indicate the extent to which HLA-restricted CTL populations have been stimulated by previous exposure to HIV or an HIV vaccine.

[0356] The class II restricted HTL responses may also be analyzed. Purified PBMC are cultured in a 96-well flat bottom plate at a density of 1.5×10⁵ cells/well and are stimulated with 10 μg/ml synthetic peptide, whole antigen, or PHA. Cells are routinely plated in replicates of 4-6 wells for each condition. After seven days of culture, the medium is removed and replaced with fresh medium containing 10 U/ml IL-2. Two days later, 1 μCi ³H-thymidine is added to each well and incubation is continued for an additional 18 hours. Cellular DNA is then harvested on glass fiber mats and analyzed for ³H-thymidine incorporation. Antigen-specific T cell proliferation is calculated as the ratio of ³H-thymidine incorporation in the presence of antigen divided by the ³H-thymidine incorporation in the absence of antigen.

### Example 18

### Induction of Specific CTL Response in Humans

[0357] A human clinical trial for an immunogenic composition comprising CTL and HTL epitopes of the invention is set up as an IND Phase I, dose escalation study and carried out as a randomized, double-blind, placebo-controlled trial. Such a trial is designed, for example, as follows:

[0358] A total of about 27 subjects are enrolled and divided into 3 groups:
[0359] Group I: 3 subjects are injected with placebo and 6 subjects are injected with 5 μg of peptide composition;
[0360] Group II: 3 subjects are injected with placebo and 6 subjects are injected with 50 μg peptide composition;
[0361] Group III: 3 subjects are injected with placebo and 6 subjects are injected with 500 μg of peptide composition.

[0362] After 4 weeks following the first injection, all subjects receive a booster inoculation at the same dosage.

[0363] The endpoints measured in this study relate to the safety and tolerability of the peptide composition as well as its immunogenicity. Cellular immune responses to the peptide composition are an index of the intrinsic activity of this the peptide composition, and can therefore be viewed as a measure of biological efficacy. The following summarize the clinical and laboratory data that relate to safety and efficacy endpoints.

[0364] Safety: The incidence of adverse events is monitored in the placebo and drug treatment group and assessed in terms of degree and reversibility.

[0365] Evaluation of Vaccine Efficacy: For evaluation of vaccine efficacy, subjects are bled before and after injection. Peripheral blood mononuclear cells are isolated from fresh heparinized blood by Ficoll-Hypaque density gradient centrifugation, aliquoted in freezing media and stored frozen. Samples are assayed for CTL and HTL activity.

[0366] The vaccine is found to be both safe and efficacious.

### Example 19

### Phase II Trials in Patients Infected with HIV

[0367] Phase II trials are performed to study the effect of administering the CTL-HTL peptide compositions to patients having chronic HIV infection. The main objectives of the trials are to determine an effective dose and regimen for inducing CTLs in chronically infected HIV patients, to establish the safety of inducing a CTL and HTL response in these patients, and to see to what extent activation of CTLs improves the clinical picture of chronically infected HIV patients, as manifested by a reduction in viral load and an increase in CD4⁺ cells counts. Such a study is designed, for example, as follows:

[0368] The studies are performed in multiple centers. The trial design is an open-label, uncontrolled, dose escalation protocol wherein the peptide composition is administered as a single dose followed six weeks later by a single booster shot of the same dose. The dosages are 50, 500 and 5,000 micrograms per injection. Drug-associated adverse effects (severity and reversibility) are recorded.

[0369] There are three patient groupings. The first group is injected with 50 micrograms of the peptide composition and the second and third groups with 500 and 5,000 micrograms of peptide composition, respectively. The patients within each group range in age from 21-65, include both males and females, and represent diverse ethnic backgrounds. All of them are infected with HIV for over five years and are HCV, HBV and delta hepatitis virus (HDV) negative, but have positive levels of HIV antigen.

[0370] The viral load and CD4⁺ levels are monitored to assess the effects of administering the peptide compositions. The vaccine composition is found to be both safe and efficacious in the treatment of HIV infection.

### Example 20

### Induction of CTL Responses Using a Prime Boost Protocol

[0371] A prime boost protocol similar in its underlying principle to that used to evaluated the efficacy of a DNA vaccine in transgenic mice, which was described in Example 12, may also be used for the administration of the vaccine to humans. Such a vaccine regimen may include an initial administration of, for example, naked DNA followed by a boost using recombinant virus encoding the vaccine, or recombinant protein/polypeptide or a peptide mixture administered in an adjuvant.

[0372] For example, the initial immunization may be performed using an expression vector, such as that constructed in Example 11, in the form of naked nucleic acid administered IM (or SC or ID) in the amounts of 0.5-5 mg at multiple sites. The nucleic acid (0.1 to 1000 μg) can also be administered using a gene gun. Following an incubation period of 3-4 weeks, a booster dose is then administered. The booster can be recombinant fowlpox virus administered at a dose of 5-10⁷ to 5×10⁹ pfu. An alternative recombinant virus, such as an MVA, canarypox, adenovirus, or adeno-associated virus, can also be used for the booster, or the polyepitopic protein or a mixture of the peptides can be administered. For evaluation of vaccine efficacy, patient blood samples will be obtained before immunization as well as at intervals following administration of the initial vaccine and booster doses of the vaccine. Peripheral blood mononuclear cells are isolated from fresh heparinized blood by Ficoll-Hypaque density gradient centrifugation, aliquoted in freezing media and stored frozen. Samples are assayed for CTL and HTL activity.

[0373] Analysis of the results will indicate that a magnitude of sufficient response to achieve protective immunity against HIV is generated.

### Example 21

### Administration of Vaccine Compositions Using Dendritic Cells

[0374] Vaccines comprising peptide epitopes of the invention may be administered using dendritic cells. In this example, the immunogenic peptide epitopes are used to elicit a CTL and/or HTL response ex vivo.

[0375] Ex vivo CTL or HTL responses to a particular antigen (infectious or tumor-associated antigen) are induced by incubating in tissue culture the patient's, or genetically compatible, CTL or HTL precursor cells together with a source of antigen-presenting cells (APC), such as dendritic cells, and the appropriate immunogenic peptides. After an appropriate incubation time (typically about 14 weeks), in which the precursor cells are activated and expanded into effector cells, the cells are infused back into the patient, where they will destroy (CTL) or facilitate destruction (HTL) of their specific target cells, i.e., HIV-infected cells.

### Example 22

### Alternative Method of Identifying Motif-Bearing Peptides

[0376] Another way of identifying motif-bearing peptides is to elute them from cells bearing defined MHC molecules. For example, EBV transformed B cell lines used for tissue typing, have been extensively characterized to determine which HLA molecules they express. In certain cases these cells express only a single type of HLA molecule. These cells can then be infected with a pathogenic organism or transfected with nucleic acids that express the antigen of interest, e.g. HIV regulatory or structural proteins. Thereafter, peptides produced by endogenous antigen processing of peptides produced consequent to infection (or as a result of transfection) will bind to HLA molecules within the cell and be transported and displayed on the cell surface.

[0377] The peptides are then eluted from the HLA molecules by exposure to mild acid conditions and their amino acid sequence determined, e.g., by mass spectral analysis (e.g., Kubo et al., J. Immunol. 152:3913, 1994). Because, as disclosed herein, the majority of peptides that bind a particular HLA molecule are motif-bearing, this is an alternative modality for obtaining the motif-bearing peptides correlated with the particular HLA molecule expressed on the cell.

[0378] Alternatively, cell lines that do not express any endogenous HLA molecules can be transfected with an expression construct encoding a single HLA allele. These cells may then be used as described, i.e., they may be infected with a pathogenic organism or transfected with nucleic acid encoding an antigen of interest to isolate peptides corresponding to the pathogen or antigen of interest that have been presented on the cell surface. Peptides obtained from such an analysis will bear motif(s) that correspond to binding to the single HLA allele that is expressed in the cell.

[0379] As appreciated by one in the art, one can perform a similar analysis on a cell bearing more than one HLA allele and subsequently determine peptides specific for each HLA allele expressed. Moreover, one of skill would also recognize that means other than infection or transfection, such as loading with a protein antigen, can be used to provide a source of antigen to the cell.

[0380] The above examples are provided to illustrate the invention but not to limit its scope. For example, the human terminology for the Major Histocompatibility Complex, namely HLA, is used throughout this document. It is to be appreciated that these principles can be extended to other species as well. Thus, other variants of the invention will be readily apparent to one of ordinary skill in the art and are encompassed by the appended claims. All publications, patents, and patent application cited herein are hereby incorporated by reference for all purposes.

TABLE I

| | POSITION | POSITION | POSITION |
|---|---|---|---|
| | 2 (Primary | 3 (Primary | C Terminus |
| | Anchor) | Anchor) | (Primary Anchor) |
| SUPERMOTIFS | | | |
| A1 | TILVMS | | FWY |
| A2 | LIVMATQ | | IVMATL |
| A3 | VSMATLI | | RK |
| A24 | YFWIVLMT | | FIYWLM |
| B7 | P | | VILFMWYA |
| B27 | RHK | | FYLWMIVA |
| B44 | ED | | FWYLIMVA |
| B58 | ATS | | FWYLIVMA |
| B62 | QLIVMP | | FWYMIVLA |
| MOTIFS | | | |
| A1 | TSM | | Y |
| A1 | | DEAS | Y |
| A2.1 | LMVQIAT | | VLIMAT |
| A3 | LMVISATFCGD | | KYRHFA |
| A11 | VTMLISAGNCDF | | KRYH |
| A24 | YFWM | | FLIW |
| A*3101 | MVTALIS | | RK |
| A*3301 | MVALFIST | | RK |
| A*6801 | AVTMSLI | | RK |
| B*0702 | P | | LMFWYAIV |
| B*3501 | P | | LMFWYIVA |
| B51 | P | | LIVFWYAM |
| B*5301 | P | | IMFWYALV |
| B*5401 | P | | ATIVLMFWY |

[0381] Bolded residues are preferred, italicized residues are less preferred: A peptide is considered motif-bearing if it has primary anchors at each primary anchor position for a motif or supermotif as specified in the above table.

TABLE Ia

| | POSITION | POSITION | POSITION |
|---|---|---|---|
| | 2 (Primary | 3 (Primary | C Terminus |
| | Anchor) | Anchor) | (Primary Anchor) |
| SUPERMOTIFS | | | |
| A1 | TILVMS | | FWY |
| A2 | VQAT | | VLIMAT |
| A3 | VSMATLI | | RK |
| A24 | YFWIVLMT | | FIYWLM |
| B7 | P | | VILFMWYA |
| B27 | RHK | | FYLWMIVA |
| B58 | ATS | | FWYLIVMA |
| B62 | QLIVMP | | FWYMIVLA |
| MOTIFS | | | |
| A1 | TSM | | Y |
| A1 | | DEAS | Y |
| A2.1 | VQAT* | | VLIMAT |
| A3.2 | LMVISATFCGD | | KYRHFA |
| A11 | VTMLISAGNCDF | | KRHY |
| A24 | YFW | | FLIW |

*If 2 is V, or Q, the C-term is not L

[0382] Bolded residues are preferred, italicized residues are less preferred: A peptide is considered motif-bearing if it has primary anchors at each primary anchor position for a motif or supermotif as specified in the above table.

TABLE II

| | | POSITION | | | | | | | | |
|---|---|---|---|---|---|---|---|---|---|---|
| SUPERMOTIFS | | [chemical structure] | [chemical structure] | [chemical structure] | [chemical structure] | [chemical structure] | [chemical structure] | [chemical structure] | [chemical structure] | C-terminus |
| A1 | | | [chemical structure] | | | | | | | [chemical structure] |
| A2 | | | [chemical structure] | | | | | | | [chemical structure] |
| A3 | preferred deleterious | DE(3/5); P(5/5) | [chemical structure] | YFW(4/5) DE(4/5) | | | YFW (3/5) | YFW (4/5) | P (4/5) | [chemical structure] |
| A24 | | | [chemical structure] | | | | | | | [chemical structure] |
| B7 | preferred | FWY(5/5) LIVM(3/5) | [chemical structure] | FWY(4/5) | | | | | FWY(3/5) | [chemical structure] |
| | deleterious | DE(3/5); P(5/5); | | | | DE(3/5) | G(4/5) | QN(4/5) | DE(4/5) | |
| | | G(4/5); A(315); | | | | | | | | |
| | | QN(3/5) | | | | | | | | |
| B27 | | | [chemical structure] | | | | | | | [chemical structure] |
| B44 | | | [chemical structure] | | | | | | | [chemical structure] |
| B58 | | | [chemical structure] | | | | | | | [chemical structure] |
| B62 | | | [chemical structure] | | | | | | | [chemical structure] |

| | | POSITION | | | | | | | | |
|---|---|---|---|---|---|---|---|---|---|---|
| | | [chemical structure] | [chemical structure] | [chemical structure] | [chemical structure] | [chemical structure] | [chemical structure] | [chemical structure] | [chemical structure] | C-terminus |
| | | POSITION | | | | | | | | |
| MOTIFS | | [chemical structure] | [chemical structure] | [chemical structure] | [chemical structure] | [chemical structure] | [chemical structure] | [chemical structure] | [chemical structure] | C-terminus |
| A1 9-mer | preferred | GFYW | [chemical structure] | DEA | YFW | P | DEQN | YFW | [chemical structure] | |
| | deleterious | DE | | [chemical structure] | A | G | A | | | |
| A1 9-mer | preferred | GRHK | [chemical structure] | [chemical structure] | GSTC | | ASTC | LIVM | DE | [chemical structure] |
| | deleterious | A | [chemical structure] | | DE | PQN | RHK | PG | GP | |

| | | POSITION | | | | | | | | | |
|---|---|---|---|---|---|---|---|---|---|---|---|
| | | [chemical structure] | [chemical structure] | [chemical structure] | [chemical structure] | [chemical structure] | [chemical structure] | [chemical structure] | [chemical structure] | [chemical structure] | C-terminus |
| A1 10-mer | peferred | YFW | [chemical structure] | DEAQN | A | YFWQN | | PASTC | GDE | P | [chemical structure] |
| | deleterious | GP | | [chemical structure] | DE | RHK | QNA | RHKYFW | RHK | A | |
| A1 10-mer | preferred | YFW | STCLIVM | [chemical structure] | A | YFW | | PG | G | YFW | [chemical structure] |
| | deleterious | RHK | [chemical structure] | | | P | G | | PRHK | QN | |
| A2.1 9-mer | preferred | YFW | [chemical structure] | YFW | STC | YFW | | A | P | [chemical structure] | |
| | deleterious | DEP | | DERKH | | | RKH | DERKH | | | |
| A2.1 10-mer | preferred | AYFW | [chemical structure] | LVIM | G | | G | | [chemical structure] | | [chemical structure] |
| | deleterious | DEP | | DE | RKHA | P | | RKH | [chemical structure] | RKH | |

| | | POSITION | | | | | | | | | |
|---|---|---|---|---|---|---|---|---|---|---|---|
| | | [chemical structure] | [chemical structure] | [chemical structure] | [chemical structure] | [chemical structure] | [chemical structure] | [chemical structure] | [chemical structure] | C-terminus | |
| A3 | preferred | RHK | [chemical structure] | YFW | PRHKYFW | A | YFW | | P | [chemical structure] | |
| | deleterious | DEP | | DE | | | | | | | |
| A11 | preferred | A | [chemical structure] | YFW | YFW | A | YFW | YFW | P | [chemical structure] | |
| | deleterious | DEP | | | | | | A | G | | |
| A24 9-mer | preferred | [chemical structure] | | STC | | | YFW | YFW | [chemical structure] | | |
| | deleterious | DEG | | DE | G | QNP | DERHK | G | AQN | | |
| A24 10-mer | preferred | | [chemical structure] | | P | YFWP | | P | | | [chemical structure] |
| | deleterious | | | GDE | QN | RHK | DE | A | QN | DEA | |

| | | POSITION | | | | | | | | | |
|---|---|---|---|---|---|---|---|---|---|---|---|
| | | [chemical structure] | [chemical structure] | [chemical structure] | [chemical structure] | [chemical structure] | [chemical structure] | [chemical structure] | [chemical structure] | [chemical structure] | C-terminus |
| A3101 | preferred | RHK | [chemical structure] | YFW | P | | YFW | YFW | AP | [chemical structure] | |
| | deleterious | DEP | | DE | | ADE | DE | DE | DE | | |
| A3301 | preferred | | [chemical structure] | YFW | | | | AYFW | | [chemical structure] | |
| | deleterious | GP | | DE | | | | | | | |
| A6801 | preferred | YFWSTC | [chemical structure] | | | [chemical structure] | | YFW | P | [chemical structure] | |
| | deleterious | GP | | DEG | | RHK | | | A | | |
| B0702 | preferred | RHKFWY | [chemical structure] | RHK | | RHK | RHK | RHK | PA | [chemical structure] | |
| | deleterious | DEQNP | | DEP | DE | DE | GDE | QN | DE | | |
| B3501 | preferred | FWYLIVM | [chemical structure] | FWY | | | | FWY | [chemical structure] | | |
| | deleterious | AGP | | | | | G | G | | | |

| | | POSITION | | | | | | | | | |
|---|---|---|---|---|---|---|---|---|---|---|---|
| | | [chemical structure] | [chemical structure] | [chemical structure] | [chemical structure] | [chemical structure] | [chemical structure] | [chemical structure] | [chemical structure] | [chemical structure] | C-terminus |
| B51 | preferred | LIVMFWY | [chemical structure] | FWY | STC | FWY | | G | FWY | [chemical structure] | |
| | deleterious | AGPDERHKSTC | | | | DE | G | DEQN GDE | | | |
| B5301 | preferred | LIVMFWY | [chemical structure] | FWY | STC | FWY | | LIVMFWY | FWY | [chemical structure] | |
| | deleterious | AGPQN | | | | | G | RHKQN | DE | | |
| B5401 | preferred | FWY | [chemical structure] | FWYLIVM | | LIVM | | ALIVM | FWYAP | [chemical structure] | |
| | deleterious | GPQNDE | | GDESTC | | RHKDE | DE | QNDGE | DE | | |

Italicized residues indicate less preferred or “tolerated” residues.
The information in Table II is specific for 9-mers unless otherwise specified.

Italicized residues indicate less preferred or “tolerated” residues.

[0383] The information in Table II is specific for 9-mers unless otherwise specified.

TABLE III

| | | POSITION | | | | | | | | | |
|---|---|---|---|---|---|---|---|---|---|---|---|
| MOTIFS | | [chemical structure] | [chemical structure] | [chemical structure] | [chemical structure] | [chemical structure] | [chemical structure] | [chemical structure] | [chemical structure] | [chemical structure] | |
| DR4 | preferred | FMYLIVW | M | T | | I | VSTCPALIM | MH | | MH | |
| | deleterious | | | | W | | | R | | WDE | |
| DR1 | preferred | MFLIVWY | | | PAMQ | | VMATSPLIC | M | | AVM | |
| | deleterious | | C | CH | FD | CWD | | GDE | D | | |
| DR7 | preferred | MFLIVWY | M | W | A | | IVMSACTPL | M | | IV | (SEQ ID NO:14527) |
| | deleterious | | C | | G | | | GRD | N | G | (SEQ ID NO:14528) |

| | | |
|---|---|---|
| DR Supermotif | MFLIVWY | VMSTACPLI |

| DR3 MOTIFS | [chemical structure] | [chemical structure] | [chemical structure] | [chemical structure] | [chemical structure] | [chemical structure] |
|---|---|---|---|---|---|---|
| motif a | LIVMFY | | | D | | |
| preferred | | | | | | |
| motif b | LIVMFAY | | | DNQEST | | KRH |
| preferred | | | | | | |

Italicized residues indicate less preferred or “tolerated” residues.

[0384] Italicized residues indicate less preferred or “tolerated” residues.

TABLE IV

HLA Class I Standard Peptide Binding Affinity.

| | | | | |
|---|---|---|---|---|
| | | | | STANDARD |
| | STANDARD | | | BINDING |
| ALLELE | PEPTIDE | SEQ ID | SEQUENCE | AFFINITY (nM) |

| | | | | |
|---|---|---|---|---|
| A*0101 | 944.02 | 14492 | YLEPAIAKY | 25 |
| A*0201 | 941.01 | 14493 | FLPSDYFPSV | 5.0 |
| A*0202 | 941.01 | 14494 | FLPSDYFPSV | 4.3 |
| A*0203 | 941.01 | 14495 | FLPSDYFPSV | 10 |
| A*0205 | 941.01 | 14496 | FLPSDYFPSV | 4.3 |
| A*0206 | 941.01 | 14497 | FLPSDYFPSV | 3.7 |
| A*0207 | 941.01 | 14498 | FLPSDYFPSV | 23 |
| A*6802 | 1141.02 | 14499 | FTQAGYPAL | 40 |
| A*0301 | 941.12 | 14500 | KVFPYALINK | 11 |
| A*1101 | 940.06 | 14501 | AVDLYHFLK | 6.0 |
| A*3101 | 941.12 | 14502 | KVFPYALINK | 18 |
| A*3301 | 1083.02 | 14503 | STLPETYVVRR | 29 |
| A*6801 | 941.12 | 14504 | KVFPYALINK | 8.0 |
| A*2402 | 979.02 | 14505 | AYIDNYNKF | 12 |
| B*0702 | 1075.23 | 14506 | APRTLVYLL | 5.5 |
| B*3501 | 1021.05 | 14507 | FPFKYAAAF | 7.2 |
| B51 | 1021.05 | 14508 | FPFKYAAAF | 5.5 |
| B*5301 | 1021.05 | 14509 | FPFKYAAAF | 9.3 |
| B*5401 | 1021.05 | 14510 | FPFKYAAAF | 10 |

[0385] TABLE V
HLA Class II Standard Peptide Binding Affinity.

| | | | | | |
|---|---|---|---|---|---|
| | | | | | Binding |
| | | Standard | SEQ | | Affinity |
| Allele | Nomenclature | Peptide | ID | Sequence | (nM) |

| | | | | | |
|---|---|---|---|---|---|
| DRB1*0101 | DR1 | 515.01 | 14511 | PKYVKQNTLKLAT | 5.0 |
| DRB1*0301 | DR3 | 829.02 | 14512 | YKTIAFDEEARR | 300 |
| DRB1*0401 | DR4w4 | 515.01 | 14513 | PKYVKQNTLKLAT | 45 |
| DRB1*0404 | DR4w14 | 717.01 | 14514 | YARFQSQTTLKQKT | 50 |
| DRB1*0405 | DR4w15 | 717.01 | 14515 | YARFQSQTTLKQKT | 38 |
| DRB1*0701 | DR7 | 553.01 | 14516 | QYIKANSKFIGITE | 25 |
| DRB1*0802 | DR8w2 | 553.01 | 14517 | QYIKANSKFIGITE | 49 |
| DRB1*0803 | DR8w3 | 553.01 | 14518 | QYTKANSKFIGITE | 1600 |
| DRB1*0901 | DR9 | 553.01 | 14519 | QYIKANSKFIGITE | 75 |
| DRB1*1101 | DR5w11 | 553.01 | 14520 | QYIKANSKFIGITE | 20 |
| DRB1*1201 | DRSw12 | 1200.05 | 14521 | EALIHQLKINPYVLS | 298 |
| DRB1*1302 | DR6w19 | 650.22 | 14522 | QYIKANAKFIGITE | 3.5 |
| DRB1*1501 | DR2w2β1 | 507.02 | 14523 | GRTQDENPVVHFFK | 9.1 |
| | | | | NIVTPRTPPP | |
| DRB3*0101 | DR52a | 511 | 14524 | NGQIGNDPNRDIL | 470 |
| DRB4*0101 | DRw53 | 717.01 | 14525 | YARFQSQTTLKQKT | 58 |
| DRB5*0101 | DR2w2β2 | 553.01 | 14526 | QYIKANSKFIGITE | 20 |

[0386] The “Nomenclature” column lists the allelic designations used in Tables XIX and XX.

TABLE VI

| | Allelle-specific HLA-supertype members | |
|---|---|---|
| HLA-supertype | Verified^{a} | Predicted^{b} |
| A1 | A*0101, A*2501, A*2601, A*2602, A*3201 | A*0102, A*2604, A*3601, A*4301, A*8001 |
| A2 | A*0201, A*0202, A*0203, A*0204, A*0205, | A*0208, A*0210, A*0211, A*0212, A*0213 |
| | A*0206, A*0207, A*0209, A*0214, A*6802, A*6901 | |
| A3 | A*0301, A*1101, A*3101, A*3301, A*6801 | A*0302, A*1102, A*2603, A*3302, A*3303, A*3401, |
| | | A*3402, A*6601, A*6602, A*7401 |
| A24 | A*2301, A*2402, A*3001 | A*2403, A*2404, A*3002, A*3003 |
| B7 | B*0702, B*0703, B*0704, B*0705, B*1508, B*3501, | B*1511, B*4201, B*5901 |
| | B*3502, B*3503, B*3504, B*3505, B*3506, B*3507, | |
| | B*3508, B*5101, B*5102, B*5103, B*5104, B*5105, | |
| | B*5301, B*5401, B*5501, B*5502, B*5601, B*5602, | |
| | B*6701, B*7801 | |
| B27 | B*1401, B*1402, B*1509, B*2702, B*2703, B*2704, | B*2701, B*2707, B*2708, B*3802, B*3903, B*3904, |
| | B*2705, B*2706, B*3801, B*3901, B*3902, B*7301 | B*3905, B*4801, B*4802, B*1510, B*1518, B*1503 |
| B44 | B*1801, B*1802, B*3701, B*4402, B*4403, B*4404, | B*4101, B*4501, B*4701, B*4901, B*5001 |
| | B*4001, B*4002, B*4006 | |
| B58 | B*5701, B*5702, B*5801, B*5802, B*1516, B*1517 | |
| B62 | B*1501, B*1502, B*1513, B*5201 | B*1301, B*1302, B*1504, B*1505, B*1506, B*1507, |
| | | B*1515, B*1520, B*1521, B*1512, B*1514, B*1510 |

^{a}Verified alleles include alleles whose specificity has been determined by pool sequencing analysis, peptide binding assays, or by analysis of the sequences of CTL epitopes.
^{b}Predicted alleles are alleles whose specificity is predicted on the basis of B and F pocket structure to overlap with the supertype specificity.

[0387] TABLE VII

HIV A01 Super Motif Peptides with Binding
Information

| | | | | | | | |
|---|---|---|---|---|---|---|---|
| | | | | | Con- | | |
| | | | | Se- | ser- | | |
| | | Po- | No. of | quence | van- | | SEQ |
| Pro- | | si- | Amino | Fre- | cy | | ID |
| tein | Sequence | tion | Acids | quency | (%) | A*0101 | NO |

| | | | | | | | |
|---|---|---|---|---|---|---|---|
| ENV | KLWVTVYY | 44 | 8 | 11 | 17 | | 1 |
| ENV | NLWVTVYY | 44 | 8 | 35 | 56 | | 2 |
| ENV | DTEVIINVW | 75 | 8 | 19 | 30 | | 3 |
| ENV | VTENFNMW | 102 | 8 | 34 | 53 | | 4 |
| ENV | RIGPGQTF | 357 | 8 | 11 | 17 | | 5 |
| ENV | GIGPGQTF | 360 | 8 | 01 | 33 | | 6 |
| ENV | SIGSGQAF | 360 | 8 | 01 | 33 | | 7 |
| ENV | KLREIRQF | 405 | 8 | 01 | 25 | | 8 |
| ENV | STNGTETF | 537 | 8 | 01 | 17 | | 9 |
| ENV | AVGIGAVF | 595 | 8 | 11 | 17 | | 10 |
| ENV | IILLKLTVW | 650 | 8 | 13 | 20 | | 11 |
| ENV | IILLQLTVW | 650 | 8 | 34 | 53 | | 12 |
| ENV | HMLQLTVW | 650 | 8 | 10 | 16 | | 13 |
| ENV | RVLAVERY | 665 | 8 | 33 | 52 | | 14 |
| ENV | NVPWNSSW | 693 | 8 | 13 | 20 | | 15 |
| ENV | EIWDNMTW | 716 | 8 | 13 | 20 | | 16 |
| ENV | DLLALDKW | 754 | 8 | 21 | 33 | | 17 |
| ENV | ELLELDKW | 754 | 8 | 20 | 31 | | 18 |
| ENV | DITNWLWY | 769 | 8 | 10 | 16 | | 19 |
| ENV | WLWYIKIF | 773 | 8 | 50 | 78 | | 20 |
| ENV | LIGLRIIF | 787 | 8 | 16 | 25 | | 21 |
| ENV | LIGLRIVF | 787 | 8 | 29 | 45 | | 22 |
| ENV | SIRLVNGF | 842 | 8 | 13 | 20 | | 23 |
| ENV | SIRLVSGF | 842 | 8 | 13 | 20 | | 24 |
| ENV | DLRNLCLF | 856 | 8 | 17 | 27 | | 25 |
| ENV | DLRSLCLF | 856 | 8 | 38 | 59 | | 26 |
| ENV | RSLCLFSY | 858 | 8 | 35 | 55 | | 27 |
| ENV | ELLGRRGW | 881 | 8 | 31 | 37 | | 28 |
| ENV | TVYYGVPVW | 48 | 9 | 55 | 86 | | 29 |
| ENV | NVTENFNMW | 101 | 9 | 34 | 53 | | 30 |
| ENV | DSSNSTGNY | 218 | 9 | 01 | 20 | | 31 |
| ENV | ILKCNDKKF | 271 | 9 | 12 | 19 | | 32 |
| ENV | RIGPGQTFY | 357 | 9 | 11 | 17 | | 33 |
| ENV | GIGPGQTFY | 360 | 9 | 01 | 33 | | 34 |
| ENV | SIGSGQAFY | 360 | 9 | 01 | 33 | | 35 |
| ENV | DLEITTIISF | 428 | 9 | 21 | 33 | | 36 |
| ENV | IISFNCGGEF | 434 | 9 | 36 | 56 | | 37 |
| ENV | HSFNCRGEF | 434 | 9 | 16 | 25 | | 38 |
| ENV | RIKQIINMW | 488 | 9 | 30 | 47 | | 39 |
| ENV | RIKQIVNMW | 488 | 9 | 12 | 19 | | 40 |
| ENV | GSENGTETF | 538 | 9 | 02 | 18 | | 41 |
| ENV | GIGAVFLGF | 598 | 9 | 11 | 18 | | 42 |
| ENV | MLGAMFLGF | 599 | 9 | 04 | 36 | | 43 |
| ENV | TIGAMFLGF | 599 | 9 | 03 | 27 | | 44 |
| ENV | LICTTAVPW | 688 | 9 | 19 | 30 | | 45 |
| ENV | LICTTNVPW | 688 | 9 | 17 | 27 | | 46 |
| ENV | LICTTTVPW | 688 | 9 | 12 | 19 | | 47 |
| ENV | ALDKWASLW | 757 | 9 | 11 | 17 | | 48 |
| ENV | ELDKWASLW | 757 | 9 | 18 | 28 | | 49 |
| ENV | GLIGLRIIF | 786 | 9 | 15 | 23 | | 50 |
| ENV | GLIGLRIVF | 786 | 9 | 29 | 45 | | 51 |
| ENV | IVNRVRQGY | 799 | 9 | 38 | 59 | | 52 |
| ENV | RSIRLVNGF | 841 | 9 | 12 | 19 | | 53 |
| ENV | RSIRLVSGF | 841 | 9 | 13 | 20 | | 54 |
| ENV | VSGFLALAW | 846 | 9 | 16 | 25 | | 55 |
| ENV | FSYIIRLRDF | 863 | 9 | 18 | 28 | | 56 |
| ENV | SLKGLRLGW | 889 | 9 | 11 | 39 | | 57 |
| ENV | SLRGLQRGW | 889 | 9 | 05 | 18 | | 58 |
| ENV | RLGWEGLKY | 894 | 9 | 09 | 29 | | 59 |
| ENV | VTVYYGVPVW | 47 | 10 | 55 | 86 | | 60 |
| ENV | QMIIEDIISLW | 116 | 10 | 29 | 45 | | 61 |
| ENV | ITQACPKVSF | 245 | 10 | 29 | 45 | | 62 |
| ENV | VSFEPIPIIIY | 253 | 10 | 28 | 44 | | 63 |
| ENV | PIIIYCAPAGF | 260 | 10 | 27 | 42 | | 64 |
| ENV | PIIIYCTPAGF | 260 | 10 | 10 | 16 | | 65 |
| ENV | AILKCNDKKF | 270 | 10 | 12 | 19 | | 66 |
| ENV | NTSPRSRVAY | 376 | 10 | 01 | 33 | | 67 |
| ENN | IISFNCGGEFF | 434 | 10 | 35 | 55 | | 68 |
| ENV | IISFNCRGEFF | 434 | 10 | 16 | 25 | | 69 |
| ENV | NTETNKTETF | 537 | 10 | 01 | 17 | | 70 |
| ENV | NTTGNTTETF | 537 | 10 | 01 | 17 | | 71 |
| ENV | KLICTTAVPW | 687 | 10 | 19 | 30 | | 72 |
| ENV | KLICTTNVPW | 687 | 10 | 17 | 27 | | 73 |
| ENV | KLICTTTVPW | 687 | 10 | 12 | 19 | | 74 |
| ENV | TTNVPWNSS | 691 | 10 | 11 | 17 | | 75 |
| ENV | SIVNRVRQGY | 798 | 10 | 36 | 56 | | 76 |
| ENV | LVSGFLALAW | 845 | 10 | 16 | 25 | | 77 |
| ENV | DLRNLCLFSY | 856 | 10 | 16 | 25 | | 78 |
| ENV | DLRSLCLFSY | 856 | 10 | 35 | 55 | | 79 |
| ENV | IVELLGRRGW | 879 | 10 | 22 | 34 | | 80 |
| ENV | SSLKGLRLGW | 886 | 10 | 10 | 16 | | 81 |
| ENV | WVTVYYGVPV | 46 | 11 | 55 | 86 | | 82 |
| ENV | PVWKIEATTTL | 54 | 11 | 22 | 34 | | 83 |
| ENV | TLFCASDAKA | 64 | 11 | 40 | 63 | | 84 |
| ENV | VITQACPKVSF | 244 | 11 | 14 | 22 | | 85 |
| ENV | KVSFEPIPIIIY | 252 | 11 | 28 | 44 | | 86 |
| ENV | GTAGNSSRAA | 375 | 11 | 01 | 33 | | 87 |
| ENV | TTHSFNCGGE | 432 | 11 | 16 | 25 | | 88 |
| ENV | TTIISFNCRGE | 432 | 11 | 12 | 19 | | 89 |
| ENV | VMIISFNCGGE | 432 | 11 | 13 | 20 | | 90 |
| ENV | IISFNCGGEFFY | 434 | 11 | 35 | 55 | | 91 |
| ENV | IISFNCRGEFFY | 434 | 11 | 16 | 25 | | 92 |
| ENV | NMWQEYGKA | 494 | 11 | 15 | 23 | | 93 |
| ENV | DMRDNWRSEL | 552 | 11 | 37 | 58 | | 94 |
| ENV | AVGIGAVFLGF | 595 | 11 | 11 | 17 | | 95 |
| ENV | YLKDQQLLGI | 672 | 11 | 27 | 42 | | 96 |
| ENV | YLRDQQLLGI | 672 | 11 | 18 | 28 | | 97 |
| ENV | CTTNVPWNSS | 690 | 11 | 11 | 17 | | 98 |
| ENV | WMEWEREIDN | 723 | 11 | 10 | 16 | | 99 |
| ENV | LLALDKWASL | 755 | 11 | 11 | 17 | | 100 |
| ENV | LLELDKWASL | 755 | 11 | 18 | 28 | | 101 |
| ENV | ALDKWASLW | 757 | 11 | 10 | 16 | | 102 |
| ENV | ELDKWASLWN | 757 | 11 | 16 | 25 | | 103 |
| ENV | ISNWLWYIKIF | 770 | 11 | 11 | 17 | | 104 |
| ENV | ITKWLWYIKIF | 770 | 11 | 12 | 19 | | 105 |
| ENV | ITNWLWYIKIF | 770 | 11 | 14 | 22 | | 106 |
| ENV | LSIVNRVRQGY | 797 | 11 | 34 | 53 | | 107 |
| ENV | RVRQGYSPLSF | 802 | 11 | 47 | 73 | | 108 |
| ENV | RLVSGFLALA | 844 | 11 | 16 | 25 | | 109 |
| ENV | CLFSYIIRLRDF | 861 | 11 | 18 | 28 | | 110 |
| ENV | RIVELLGRRG | 878 | 11 | 22 | 34 | | 111 |
| ENV | GLRLGWEGLK | 892 | 11 | 09 | 29 | | 112 |
| ENV | RLGWEGLKYL | 894 | 11 | 07 | 23 | | 113 |
| GAG | ASRELERF | 38 | 8 | 46 | 72 | | 114 |
| GAG | SSQVSQNY | 145 | 8 | 15 | 31 | | 115 |
| GAG | KVIEEKAF | 178 | 8 | 24 | 38 | | 116 |
| GAG | KVVEEKAF | 178 | 8 | 28 | 44 | | 117 |
| GAG | TLQEQIAW | 263 | 8 | 12 | 19 | | 118 |
| GAG | TLQEQIGW | 263 | 8 | 27 | 42 | | 119 |
| GAG | PIPVGDIY | 279 | 8 | 11 | 17 | | 120 |
| GAG | PIPVGEIY | 279 | 8 | 35 | 55 | | 121 |
| GAG | ASQEVKNW | 333 | 8 | 11 | 17 | | 122 |
| GAG | ATQDVKNW | 333 | 8 | 15 | 23 | | 123 |
| GAG | ATQEVKNW | 333 | 8 | 18 | 28 | | 124 |
| GAG | IMMQKSNF | 408 | 8 | 11 | 17 | | 125 |
| GAG | IMMQRGNF | 408 | 8 | 27 | 42 | | 126 |
| GAG | CTERQANF | 459 | 8 | 55 | 87 | | 127 |
| GAG | ETIDKDLY | 537 | 8 | 01 | 25 | | 128 |
| GAG | LTSLKSLF | 549 | 8 | 13 | 20 | | 129 |
| GAG | LTSLRSLF | 549 | 8 | 12 | 19 | | 130 |
| GAG | LSGGKLDAW | 8 | 9 | 16 | 25 | | 131 |
| GAG | GSEELRSLY | 73 | 9 | 12 | 19 | | 132 |
| GAG | NSSQVSQNY | 144 | 9 | 14 | 31 | | 133 |
| GAG | ISPRTLNAW | 168 | 9 | 36 | 56 | | 134 |
| GAG | LSPRTLNAW | 168 | 9 | 17 | 27 | | 135 |
| GAG | FSPEVIPMF | 185 | 9 | 54 | 84 | | 136 |
| GAG | TINEEAAEW | 225 | 9 | 53 | 83 | | 137 |
| GAG | STLQEQIAW | 262 | 9 | 12 | 19 | | 138 |
| GAG | STLQEQIGW | 262 | 9 | 27 | 42 | | 139 |
| GAG | PVGDIYKRW | 281 | 9 | 18 | 28 | | 140 |
| GAG | PVGEIYKRW | 281 | 9 | 40 | 63 | | 141 |
| GAG | GLNKIVRMY | 293 | 9 | 60 | 94 | 0.0017 | 142 |
| GAG | NIMMQRGNF | 407 | 9 | 10 | 17 | | 143 |
| GAG | TIMMQRGNF | 407 | 9 | 13 | 22 | | 144 |
| GAG | SSKGRPGNF | 476 | 9 | 11 | 18 | | 145 |
| GAG | PTAPPAESF | 495 | 9 | 20 | 31 | | 146 |
| GAG | PTAPPEESF | 495 | 9 | 15 | 23 | | 147 |
| GAG | PTAPPAESF | 507 | 9 | 02 | 67 | | 148 |
| GAG | PTAPPPESF | 507 | 9 | 01 | 33 | | 149 |
| GAG | PLASLKSLF | 548 | 9 | 15 | 23 | | 150 |
| GAG | PLTSLKSLF | 548 | 9 | 12 | 19 | | 151 |
| GAG | PLTSLRSLF | 548 | 9 | 12 | 19 | | 152 |
| GAG | VLSGGKLDAW | 7 | 10 | 15 | 23 | | 153 |
| GAG | RLRPGGKKKY | 20 | 10 | 34 | 53 | | 154 |
| GAG | SLFNTVATLY | 79 | 10 | 15 | 23 | | 155 |
| GAG | SLYNTYATLY | 79 | 10 | 22 | 34 | | 156 |
| GAG | AISPRTLNAW | 167 | 10 | 29 | 45 | | 157 |
| GAG | ALSPRTLNAW | 167 | 10 | 10 | 16 | | 158 |
| GAG | WVKVIEEKAF | 176 | 10 | 24 | 38 | | 159 |
| GAG | WVKVVEEKAF | 176 | 10 | 28 | 44 | | 160 |
| GAG | DTINEEAAEW | 224 | 10 | 31 | 48 | | 161 |
| GAG | ETINEEAAEW | 224 | 10 | 22 | 34 | | 162 |
| GAG | TSTLQEQIAW | 261 | 10 | 12 | 19 | | 163 |
| GAG | TSTLQEQIGW | 261 | 10 | 27 | 42 | | 164 |
| GAG | DIKQGPKEPF | 308 | 10 | 19 | 30 | | 165 |
| GAG | DIRQGPKEPF | 308 | 10 | 41 | 64 | | 166 |
| GAG | ATIMMQRGNF | 406 | 10 | 11 | 28 | | 167 |
| GAG | PSIIKGRPGNF | 475 | 10 | 23 | 36 | | 168 |
| GAG | PSNKGRPGNF | 475 | 10 | 14 | 22 | | 169 |
| GAG | PSSKGRPGNF | 475 | 10 | 11 | 17 | | 170 |
| GAG | SVLSGGKLDA | 6 | 11 | 15 | 23 | | 171 |
| GAG | IVWASRELERF | 35 | 11 | 19 | 30 | | 172 |
| GAG | LVWASRELER | 35 | 11 | 25 | 39 | | 173 |
| GAG | RSLYNTVATL | 78 | 11 | 15 | 24 | | 174 |
| GAG | TTSTLQEQIA | 260 | 11 | 11 | 17 | | 175 |
| GAG | TTSTLQEQIG | 260 | 11 | 27 | 43 | | 176 |
| GAG | PIPVGEIYKRW | 279 | 11 | 34 | 53 | | 177 |
| GAG | ILGLNKIVRMY | 291 | 11 | 57 | 89 | | 178 |
| GAG | ASAQQDLKGG | 392 | 11 | 01 | 50 | | 179 |
| GAG | ATAQQDLKGG | 392 | 11 | 01 | 50 | | 180 |
| GAG | PTAPPAESFGF | 495 | 11 | 10 | 16 | | 181 |
| GAG | PTAPPEESFRF | 495 | 11 | 14 | 22 | | 182 |
| GAG | PTAPPAESFRF | 507 | 11 | 02 | 67 | | 183 |
| GAG | PTAPPPESFRF | 507 | 11 | 01 | 33 | | 184 |
| NEF | ATNADCAW | 71 | 8 | 12 | 22 | | 185 |
| NEF | PMTYKGAF | 105 | 8 | 12 | 19 | | 186 |
| NEF | DILDLWVY | 185 | 8 | 20 | 31 | | 187 |
| NEF | EILDLWVY | 185 | 8 | 33 | 52 | | 188 |
| NEF | WVYHTQGF | 191 | 8 | 13 | 20 | | 189 |
| NEF | WVYIITQGY | 191 | 8 | 21 | 33 | | 190 |
| NEF | GIRYPLTF | 213 | 8 | 13 | 20 | | 191 |
| NEF | GTRFPLTF | 213 | 8 | 13 | 20 | | 192 |
| NEF | PLTFGWCF | 219 | 8 | 43 | 67 | | 193 |
| NEF | WSKSSIVGW | 5 | 9 | 20 | 31 | | 194 |
| NEF | QVPLRPMTF | 100 | 9 | 10 | 16 | | 195 |
| NEF | QVPLRPMTY | 100 | 9 | 46 | 72 | 0.0008 | 196 |
| NEF | WVYIITQGFF | 191 | 9 | 13 | 20 | | 197 |
| NEF | WVYHTQGYF | 191 | 9 | 21 | 33 | | 198 |
| NEF | HTQGFFPDW | 194 | 9 | 14 | 22 | | 199 |
| NEF | HTQGYFPDW | 194 | 9 | 25 | 39 | | 200 |
| NEF | NTQGYFPDW | 194 | 9 | 12 | 19 | | 201 |
| NEF | YTPGPGIRY | 207 | 9 | 17 | 27 | | 202 |
| NEF | YTPGPGTRF | 207 | 9 | 13 | 20 | | 203 |
| NEF | DLWVYIITQGF | 188 | 10 | 13 | 20 | | 204 |
| NEF | DLWVYIITQGY | 188 | 10 | 21 | 33 | | 205 |
| NEF | GIRYPLTFGW | 213 | 10 | 13 | 20 | | 206 |
| NEF | GTRFPLTFGW | 213 | 10 | 12 | 19 | | 207 |
| NEF | IIMARELIIPEY | 320 | 10 | 10 | 16 | | 208 |
| NEF | NTAATNADCA | 68 | 11 | 12 | 19 | | 209 |
| NEF | PLRPMTYKGA | 102 | 11 | 12 | 19 | | 210 |
| NEF | DLWVYIITQGF | 188 | 11 | 13 | 20 | | 211 |
| NEF | DLWVYIITQGY | 188 | 11 | 21 | 33 | | 212 |
| NEF | IIMARELIIPEY | 320 | 11 | 10 | 16 | | 213 |
| POL | DINLPGKW | 122 | 8 | 13 | 20 | | 214 |
| POL | EINLPGKW | 122 | 8 | 12 | 19 | | 215 |
| POL | MIGGIGGF | 133 | 8 | 62 | 97 | | 216 |
| POL | QIGCTLNF | 179 | 8 | 41 | 64 | | 217 |
| POL | QLGCTLNF | 179 | 8 | 16 | 25 | | 218 |
| POL | KIGPENPY | 238 | 8 | 51 | 80 | | 219 |
| POL | RIGPENPY | 238 | 8 | 11 | 17 | | 220 |
| POL | VLDVGDAY | 297 | 8 | 60 | 94 | | 221 |
| POL | SVPLDKDF | 306 | 8 | 18 | 28 | | 222 |
| POL | MTKILEPF | 353 | 8 | 44 | 69 | | 223 |
| POL | QLPIEKDSW | 434 | 8 | 13 | 20 | | 224 |
| POL | VLPEKDSW | 434 | 8 | 13 | 20 | | 225 |
| POL | KLVGKLNW | 448 | 8 | 62 | 97 | | 226 |
| POL | ATESIVIW | 568 | 8 | 19 | 30 | | 227 |
| POL | ETWWTDYW | 591 | 8 | 10 | 16 | | 228 |
| POL | PIVGAETF | 625 | 8 | 28 | 44 | | 229 |
| POL | IVGAETFY | 626 | 8 | 28 | 44 | | 230 |
| POL | KIELQAIY | 668 | 8 | 12 | 19 | | 231 |
| POL | NIVTDSQY | 686 | 8 | 62 | 97 | | 232 |
| POL | LIKKEKVY | 717 | 8 | 35 | 55 | | 233 |
| POL | AVIIVASGY | 828 | 8 | 59 | 92 | | 234 |
| POL | ETGQETAY | 844 | 8 | 59 | 92 | | 235 |
| POL | ILKLAGRW | 853 | 8 | 34 | 53 | | 236 |
| POL | LLKLAGRW | 853 | 8 | 25 | 39 | | 237 |
| POL | IITDNGSNF | 866 | 8 | 51 | 80 | | 238 |
| POL | TTVKAACW | 876 | 8 | 15 | 23 | | 239 |
| POL | AVKAACWW | 877 | 8 | 32 | 50 | | 240 |
| POL | TVKAACWW | 877 | 8 | 24 | 38 | | 241 |
| POL | QIIKIQNF | 968 | 8 | 12 | 19 | | 242 |
| POL | QITKIQNF | 968 | 8 | 35 | 55 | | 243 |
| POL | KIQNFRVY | 971 | 8 | 52 | 81 | | 244 |
| POL | PTRRELQVW | 30 | 9 | 13 | 20 | | 245 |
| POL | FSFPQITLW | 85 | 9 | 14 | 22 | | 246 |
| POL | KMIGGIGGF | 132 | 9 | 62 | 97 | | 247 |
| POL | ELNKRTQDF | 268 | 9 | 57 | 89 | | 248 |
| POL | TVLDVGDAY | 296 | 9 | 57 | 89 | 0.0180 | 249 |
| POL | VLDVGDAYF | 297 | 9 | 60 | 94 | | 250 |
| POL | FSVPLDKDF | 305 | 9 | 18 | 28 | | 251 |
| POL | PLDKDFRKY | 308 | 9 | 19 | 30 | | 252 |
| POL | ETPGIRYQY | 327 | 9 | 52 | 81 | 0.0052 | 253 |
| POL | SMTKILEPF | 352 | 9 | 43 | 67 | | 254 |
| POL | ELREIILLKW | 393 | 9 | 17 | 27 | | 255 |
| POL | ELRQIILLRW | 393 | 9 | 15 | 23 | | 256 |
| POL | IVLPEKDSW | 433 | 9 | 13 | 20 | | 257 |
| POL | KLNWASQIY | 452 | 9 | 60 | 94 | 0.0070 | 258 |
| POL | VIWGKTPKF | 573 | 9 | 47 | 73 | | 259 |
| POL | KLPIQKETW | 582 | 9 | 20 | 31 | | 260 |
| POL | RLPIQKETW | 582 | 9 | 26 | 41 | | 261 |
| POL | WTDYWQATW | 594 | 9 | 14 | 22 | | 262 |
| POL | WTEYWQATW | 594 | 9 | 24 | 38 | | 263 |
| POL | ATWIPEWEF | 600 | 9 | 52 | 81 | | 264 |
| POL | NTPPLVKLW | 610 | 9 | 57 | 89 | | 265 |
| POL | PIVGAETFY | 625 | 9 | 28 | 44 | 0.0007 | 266 |
| POL | ETKLGKAGY | 641 | 9 | 35 | 55 | 0.0010 | 267 |
| POL | QLIKKEKVY | 716 | 9 | 28 | 44 | 0.0007 | 268 |
| POL | SSGIRKVLF | 745 | 9 | 26 | 41 | | 269 |
| POL | QVDCSVGIW | 805 | 9 | 57 | 89 | | 270 |
| POL | ETGQETAYF | 844 | 9 | 57 | 89 | | 271 |
| POL | FILKLAGRW | 852 | 9 | 32 | 50 | | 272 |
| POL | FLLKLAGRW | 852 | 9 | 25 | 39 | | 273 |
| POL | STTVKAACW | 875 | 9 | 15 | 23 | | 274 |
| POL | TTVKAACWW | 876 | 9 | 15 | 23 | | 275 |
| POL | KTAVQMAYF | 925 | 9 | 57 | 89 | | 276 |
| POL | QMAVFIIINF | 929 | 9 | 60 | 94 | | 277 |
| POL | KIQNFRVYY | 971 | 9 | 52 | 81 | 0.0056 | 278 |
| POL | LTQIGCTLNF | 177 | 10 | 41 | 64 | | 279 |
| POL | LTQLGCTLNF | 177 | 10 | 15 | 23 | | 280 |
| POL | GMDGPKVKQ | 201 | 10 | 51 | 80 | | 281 |
| POL | ISKIGPENPY | 236 | 10 | 42 | 66 | 0.0130 | 282 |
| POL | ISRIGPENPY | 236 | 10 | 11 | 17 | | 283 |
| POL | AIKKKDSTKW | 251 | 10 | 57 | 89 | | 284 |
| POL | STKWRKLVDF | 257 | 10 | 58 | 91 | | 285 |
| POL | ELNKRTQDFW | 268 | 10 | 57 | 89 | | 286 |
| POL | VTVLDVGDAY | 295 | 10 | 56 | 88 | 0.2800 | 287 |
| POL | TVLDVGDAYF | 296 | 10 | 57 | 89 | | 288 |
| POL | SSMTKILEPF | 351 | 10 | 33 | 52 | | 289 |
| POL | VIYQYMDDLY | 368 | 10 | 51 | 80 | 0.2500 | 290 |
| POL | PIQLVEKDSW | 432 | 10 | 13 | 20 | | 291 |
| POL | PIVLVEKDSW | 432 | 10 | 13 | 20 | | 292 |
| POL | ILKEVYIIGVY | 498 | 10 | 40 | 63 | 0.0017 | 293 |
| POL | EIQKQCQDQW | 520 | 10 | 13 | 20 | | 294 |
| POL | EIQKQGQCQW | 520 | 10 | 15 | 23 | | 295 |
| POL | WTYQIYQEPF | 529 | 10 | 42 | 66 | | 296 |
| POL | KIATESIVIW | 566 | 10 | 14 | 22 | | 297 |
| POL | IVIWGKTPKF | 572 | 10 | 47 | 73 | | 298 |
| POL | PIQKETWEAW | 584 | 10 | 15 | 23 | | 299 |
| POL | PIQKETWETW | 584 | 10 | 27 | 42 | | 300 |
| POL | ETWETWWTD | 588 | 10 | 10 | 16 | | 301 |
| POL | ETWETWWTE | 588 | 10 | 10 | 16 | | 302 |
| POL | NTPPLVKLWY | 610 | 10 | 57 | 89 | 0.0041 | 303 |
| POL | EVNIVTDSQY | 684 | 10 | 59 | 92 | 0.0530 | 304 |
| POL | VSAGIRKVLF | 744 | 10 | 15 | 23 | | 305 |
| POL | VSSGIRKVLF | 744 | 10 | 26 | 41 | | 306 |
| POL | LVAVIIVASGY | 826 | 10 | 53 | 83 | 0.0390 | 307 |
| POL | TIIITDNGSNF | 864 | 10 | 14 | 22 | | 308 |
| POL | VIIITDNGSNF | 864 | 10 | 24 | 38 | | 309 |
| POL | TSAAVKAACW | 874 | 10 | 27 | 42 | | 310 |
| POL | TSTTVKAACW | 874 | 10 | 14 | 22 | | 311 |
| POL | STTVKAACW | 875 | 10 | 15 | 23 | | 312 |
| POL | GIKQEFGIPY | 886 | 10 | 22 | 34 | 0.0010 | 313 |
| POL | GIQQEFGIPY | 886 | 10 | 11 | 17 | | 314 |
| POL | IIKIQNFRVY | 969 | 10 | 12 | 19 | | 315 |
| POL | ITKIQNFRVY | 969 | 10 | 36 | 57 | 0.0010 | 316 |
| POL | NSPTRRELQV | 28 | 11 | 12 | 19 | | 317 |
| POL | VSFSFPQITLW | 78 | 11 | 07 | 15 | | 318 |
| POL | GTTLNPPQITF | 79 | 11 | 01 | 17 | | 319 |
| POL | PSLSFPQITLW | 79 | 11 | 02 | 33 | | 320 |
| POL | GTLNCPQITL | 80 | 11 | 01 | 33 | | 321 |
| POL | PTFNFPQITLW | 80 | 11 | 01 | 33 | | 322 |
| POL | SSFSFPQITLW | 82 | 11 | 03 | 30 | | 323 |
| POL | VLEDINLPGKW | 119 | 11 | 13 | 20 | | 324 |
| POL | VLEEINLPGKW | 119 | 11 | 12 | 19 | | 325 |
| POL | GIGGFIKVRQY | 136 | 11 | 53 | 83 | | 326 |
| POL | LLTQIGCTLNF | 176 | 11 | 21 | 33 | | 327 |
| POL | MLTQIGCTLNF | 176 | 11 | 17 | 27 | | 328 |
| POL | MLTQLGCTLN | 176 | 11 | 10 | 16 | | 329 |
| POL | KISKIGPENPY | 235 | 11 | 41 | 64 | | 330 |
| POL | KISRIGPENPY | 235 | 11 | 11 | 17 | | 331 |
| POL | DSTKWRKLVD | 256 | 11 | 58 | 91 | | 332 |
| POL | SVTVLDVGDA | 294 | 11 | 56 | 88 | | 333 |
| POL | VTVLDVGDAY | 295 | 11 | 56 | 88 | | 334 |
| POL | SVPLDKDFRK | 306 | 11 | 18 | 28 | | 335 |
| POL | SINNETPGIRY | 323 | 11 | 32 | 50 | | 336 |
| POL | STNNETPGIRY | 323 | 11 | 11 | 17 | | 337 |
| POL | QSSMTKILEPF | 350 | 11 | 33 | 52 | | 338 |
| POL | IVIYQYMDDLY | 367 | 11 | 42 | 66 | | 339 |
| POL | ELREHLLKWG | 393 | 11 | 14 | 22 | | 340 |
| POL | ELRQHLLRWG | 393 | 11 | 12 | 19 | | 341 |
| POL | WMGYELHPDK | 418 | 11 | 60 | 94 | | 342 |
| POL | DIQKLVGKLN | 445 | 11 | 62 | 97 | | 343 |
| POL | EILKEPVIIGVY | 497 | 11 | 40 | 63 | | 344 |
| POL | ILKEPVIIGVYY | 498 | 11 | 38 | 59 | | 345 |
| POL | SIVIWGKTPKF | 571 | 11 | 41 | 64 | | 346 |
| POL | PIQKETWEAW | 584 | 11 | 15 | 23 | | 347 |
| POL | PIQKETWETW | 584 | 11 | 27 | 42 | | 348 |
| POL | ETWETWWTD | 588 | 11 | 10 | 16 | | 349 |
| POL | FVNTPPLVKL | 608 | 11 | 54 | 86 | | 350 |
| POL | LIKKEKVYLA | 717 | 11 | 20 | 31 | | 351 |
| POL | LIKKEKVYLSW | 717 | 11 | 13 | 20 | | 352 |
| POL | LVSAGIRKVLF | 743 | 11 | 15 | 23 | | 353 |
| POL | LVSSGIRKVLF | 743 | 11 | 26 | 41 | | 354 |
| POL | IISNWRAMAS | 768 | 11 | 32 | 50 | | 355 |
| POL | ILVAVIIVASGY | 825 | 11 | 53 | 83 | | 356 |
| POL | KVIIITDNGSNF | 863 | 11 | 21 | 33 | | 357 |
| POL | FTSAAVKAAC | 873 | 11 | 27 | 42 | | 358 |
| POL | FTSTTVKAAC | 873 | 11 | 14 | 22 | | 359 |
| POL | TSAAVKAACW | 874 | 11 | 27 | 42 | | 360 |
| POL | TSTTVKAACW | 874 | 11 | 14 | 22 | | 361 |
| POL | IILKTAVQMAV | 923 | 11 | 57 | 89 | | 362 |
| POL | AVQMAVFIIIN | 927 | 11 | 60 | 94 | | 363 |
| POL | QIIKIQNFRVY | 968 | 11 | 12 | 19 | | 364 |
| POL | QITKIQNFRVY | 968 | 11 | 35 | 55 | | 365 |
| POL | IIKIQNFRVYY | 969 | 11 | 12 | 19 | | 366 |
| POL | ITKIQNFRVYY | 969 | 11 | 36 | 57 | 0.0110 | 367 |
| POL | PIWKGPAKLL | 985 | 11 | 35 | 55 | | 368 |
| POL | PLWKGPAKLL | 985 | 11 | 18 | 28 | | 369 |
| REV | ILYQSNPY | 23 | 8 | 27 | 42 | | 370 |
| REV | AVRIIKILY | 17 | 9 | 13 | 20 | | 371 |
| REV | KILYQSNPY | 22 | 9 | 26 | 41 | | 372 |
| REV | IIKILYQSNPY | 20 | 11 | 18 | 28 | | 373 |
| TAT | PVDPNLEPW | 3 | 9 | 20 | 31 | | 374 |
| TAT | PVDPRLEPW | 3 | 9 | 14 | 22 | | 375 |
| TAT | FLNKGLGISY | 41 | 10 | 14 | 22 | | 376 |
| VIF | SLVKIIIIMY | 23 | 8 | 44 | 69 | | 377 |
| VIF | RLVITTYW | 65 | 8 | 12 | 19 | | 378 |
| VIF | QLIIILYYF | 110 | 8 | 14 | 22 | | 379 |
| VIF | QLIIIMIIYF | 110 | 8 | 14 | 22 | | 380 |
| VIF | IILYYFDCF | 113 | 8 | 16 | 25 | | 381 |
| VIF | IIMHYFDCF | 113 | 8 | 15 | 23 | | 382 |
| VIF | IVSPRCEY | 133 | 8 | 14 | 22 | | 383 |
| VIF | KSLVKIIIIMY | 22 | 9 | 18 | 28 | | 384 |
| VIF | NSLVKIIIIMY | 22 | 9 | 24 | 38 | | 385 |
| VIF | GLIITGERDW | 73 | 9 | 22 | 34 | | 386 |
| VIF | GLQTGERDW | 73 | 9 | 12 | 19 | | 387 |
| VIF | SIEWRLRRY | 89 | 9 | 11 | 17 | | 388 |
| VIF | QVDRMKIRTW | 12 | 10 | 12 | 19 | | 389 |
| VIF | QVDRMRINTW | 12 | 10 | 10 | 16 | | 390 |
| VIF | QVDRMRIRTW | 12 | 10 | 31 | 48 | | 391 |
| VIF | IILGHGVSIEW | 83 | 10 | 25 | 39 | | 392 |
| VIF | IILGQGVSIEW | 83 | 10 | 26 | 41 | | 393 |
| VIF | VSIEWRLRRY | 88 | 10 | 11 | 7 | | 394 |
| VIF | LIIILYYFDCF | 111 | 10 | 16 | 25 | | 395 |
| VIF | LIIIMIIYFDCF | 111 | 10 | 15 | 23 | | 396 |
| VIF | SVKKLTEDRW | 174 | 10 | 13 | 20 | | 397 |
| VIF | GVSIEWRLRR | 87 | 11 | 10 | 16 | | 398 |
| VIF | GLADQLIHMH | 106 | 11 | 11 | 17 | | 399 |
| VIF | QLIHLYYFDCF | 110 | 11 | 13 | 20 | | 400 |
| VIF | QLIIIMHYFDCF | 110 | 11 | 14 | 22 | | 401 |
| VIF | PSVKKLTEDR | 173 | 11 | 13 | 20 | | 402 |
| VPR | KSEAVRHF | 27 | 8 | 15 | 23 | | 403 |
| VPR | WLIIGLGQY | 38 | 8 | 11 | 17 | | 404 |
| VPR | RILQQLLF | 62 | 8 | 45 | 70 | | 405 |
| VPR | AVRIlFPRIW | 30 | 9 | 14 | 22 | | 406 |
| VPR | AVRIIFPRPW | 30 | 9 | 34 | 53 | | 407 |
| VPR | ELKNEAVRIIF | 25 | 10 | 17 | 27 | | 408 |
| VPR | ELKSEAVRIIF | 25 | 10 | 15 | 23 | | 409 |
| VPR | WLIIGLGQIIIY | 38 | 10 | 20 | 31 | | 410 |
| VPR | IIIYETYGDTW | 45 | 10 | 17 | 27 | | 411 |
| VPR | IIIYNTYGDTW | 45 | 10 | 14 | 22 | | 412 |
| VPR | YIYETYGDTW | 45 | 10 | 14 | 22 | | 413 |
| VPR | IIRILQQLLF | 60 | 10 | 41 | 64 | | 414 |
| VPR | ILQQLLFIIIF | 63 | 10 | 35 | 55 | | 415 |
| VPR | AIIRILQQLLF | 59 | 11 | 38 | 59 | | 416 |
| VPR | RILQQLLFIIIF | 62 | 11 | 34 | 53 | | 417 |
| VPU | LIIAIVVW | 26 | 8 | 10 | 16 | | 418 |
| VPU | IVVWTIVF | 30 | 8 | 15 | 23 | | 419 |
| VPU | WTIVFIEY | 34 | 8 | 12 | 19 | | 420 |
| VPU | EMGIIIIAPW | 89 | 8 | 11 | 17 | | 421 |
| VPU | AIVVWTIVF | 29 | 9 | 14 | 22 | | 422 |
| VPU | VVWTIVFIEY | 31 | 10 | 12 | 19 | | 423 |
| VPU | GVEMGIIIIAP | 91 | 10 | 01 | 50 | | 424 |
| VPU | KVDYRIVIVAF | 7 | 11 | 01 | 33 | | 425 |
| VPU | IVVWTIVFIEY | 30 | 11 | 12 | 19 | | 426 |
| VPU | RIKEIRDDSDY | 64 | 11 | 01 | 50 | | 427 |
| VPU | RIREIRDDSDY | 64 | 11 | 01 | 50 | | 428 |

[0388] TABLE VIII

HIV A02 Super Motif Peptides with Binding Information

| | | | | | | | | | | | |
|---|---|---|---|---|---|---|---|---|---|---|---|
| | | | | | | | | | | | SEQ |
| | | | No. of | Sequence | Conservancy | | | | | | ID |
| Protein | Sequence | Position | Amino Acids | Frequency | (%) | A*0201 | A*0202 | A*0203 | A*0206 | A*6802 | NO |

| | | | | | | | | | | | |
|---|---|---|---|---|---|---|---|---|---|---|---|
| ENV | LILGLVII | 21 | 8 | 09 | 15 | | | | | | 429 |
| ENV | GLVIICSA | 28 | 8 | 10 | 16 | | | | | | 430 |
| ENV | GMLMICSA | 28 | 8 | 12 | 19 | | | | | | 431 |
| ENV | QLYATVYA | 34 | 8 | 01 | 50 | | | | | | 432 |
| ENV | WVTVYYGV | 46 | 8 | 58 | 91 | | | | | | 433 |
| ENV | TVYYGVPV | 48 | 8 | 55 | 86 | | | | | | 434 |
| ENV | GVPVWKEA | 52 | 8 | 34 | 53 | | | | | | 435 |
| ENV | PVWKEATT | 54 | 8 | 22 | 34 | | | | | | 436 |
| ENV | ATTTLFCA | 59 | 8 | 24 | 38 | | | | | | 437 |
| ENV | TLFCASDA | 64 | 8 | 54 | 84 | | | | | | 438 |
| ENV | EVHNVWAT | 77 | 8 | 36 | 56 | | | | | | 439 |
| ENV | ATHACVPT | 83 | 8 | 56 | 88 | | | | | | 440 |
| ENV | NVTENFNM | 101 | 8 | 34 | 53 | | | | | | 441 |
| ENV | NMWKNDMV | 107 | 8 | 12 | 19 | | | | | | 442 |
| ENV | NMWKNNMV | 107 | 8 | 34 | 53 | | | | | | 443 |
| ENV | EQMIIEDII | 115 | 8 | 24 | 38 | | | | | | 444 |
| ENV | DQSLKPCV | 126 | 8 | 50 | 78 | | | | | | 445 |
| ENV | SLKPCVKL | 128 | 8 | 55 | 86 | | | | | | 446 |
| ENV | KLTPLCVT | 134 | 8 | 53 | 83 | | | | | | 447 |
| ENV | LTPLCVTL | 135 | 8 | 54 | 84 | | | | | | 448 |
| ENV | VTSTGNSA | 161 | 8 | 01 | 20 | | | | | | 449 |
| ENV | ALFYKLDV | 202 | 8 | 10 | 16 | | | | | | 450 |
| ENV | ALFYRLDV | 202 | 8 | 12 | 19 | | | | | | 451 |
| ENV | NISPKNNT | 217 | 8 | 01 | 33 | | | | | | 452 |
| ENV | LINCNTSA | 237 | 8 | 17 | 27 | | | | | | 453 |
| ENV | NTSAITQA | 241 | 8 | 14 | 22 | | | | | | 454 |
| ENV | NTSVITQA | 241 | 8 | 13 | 20 | | | | | | 455 |
| ENV | ITQACPKV | 245 | 8 | 37 | 58 | | | | | | 456 |
| ENV | PIPIIIYCA | 258 | 8 | 40 | 63 | | | | | | 457 |
| ENV | PIPIHYCT | 258 | 8 | 18 | 28 | | | | | | 458 |
| ENV | PIHYCAPA | 260 | 8 | 37 | 58 | | | | | | 459 |
| ENV | PIIIYCTPA | 260 | 8 | 18 | 28 | | | | | | 460 |
| ENV | CAPAGFAI | 264 | 8 | 29 | 45 | | | | | | 461 |
| ENV | CTPAGFAI | 264 | 8 | 10 | 16 | | | | | | 462 |
| ENV | GTGPCKNV | 281 | 8 | 17 | 27 | | | | | | 463 |
| ENV | NVSTVQCT | 287 | 8 | 51 | 80 | | | | | | 464 |
| ENV | TVQCTIIGI | 290 | 8 | 51 | 80 | | | | | | 465 |
| ENV | CTIIGIKPV | 294 | 8 | 33 | 52 | | | | | | 466 |
| ENV | CTIIGIRPV | 294 | 8 | 26 | 41 | | | | | | 467 |
| ENV | GIKPVVST | 297 | 8 | 33 | 52 | | | | | | 468 |
| ENV | GIRPVVST | 297 | 8 | 26 | 41 | | | | | | 469 |
| ENV | PVVSTQLL | 300 | 8 | 60 | 94 | | | | | | 470 |
| ENV | VVSTQLLL | 301 | 8 | 60 | 94 | | | | | | 471 |
| ENV | QLLLNGSL | 305 | 8 | 57 | 89 | | | | | | 472 |
| ENV | LLLNGSLA | 306 | 8 | 55 | 86 | | | | | | 473 |
| ENV | SLAEEEVV | 311 | 8 | 14 | 22 | | | | | | 474 |
| ENV | LAEEEVVI | 312 | 8 | 13 | 20 | | | | | | 475 |
| ENV | IIRSENLT | 319 | 8 | 10 | 16 | | | | | | 476 |
| ENV | CTRPNNNT | 345 | 8 | 29 | 45 | | | | | | 477 |
| ENV | NTRKSIRI | 351 | 8 | 10 | 16 | | | | | | 478 |
| ENV | NTSPRSRV | 376 | 8 | 01 | 33 | | | | | | 479 |
| ENV | TAGNSSRA | 376 | 8 | 01 | 33 | | | | | | 480 |
| ENV | IIGDIRQA | 377 | 8 | 30 | 49 | | | | | | 481 |
| ENV | MQNGTNIT | 458 | 8 | 01 | 17 | | | | | | 482 |
| ENV | IITEGNITL | 478 | 8 | 01 | 50 | | | | | | 483 |
| ENV | NITLPCRI | 482 | 8 | 11 | 17 | | | | | | 484 |
| ENV | TITLPCRI | 482 | 8 | 14 | 22 | | | | | | 485 |
| ENV | RIKQIINM | 488 | 8 | 30 | 47 | | | | | | 486 |
| ENV | RIKQIVNM | 488 | 8 | 12 | 19 | | | | | | 487 |
| ENV | IINMWQEV | 492 | 8 | 17 | 27 | | | | | | 488 |
| ENV | WQEVGKAM | 496 | 8 | 18 | 28 | | | | | | 489 |
| ENV | WQRVGQAM | 496 | 8 | 11 | 17 | | | | | | 490 |
| ENV | EVGKAMYA | 498 | 8 | 18 | 28 | | | | | | 491 |
| ENV | RVGQAMYA | 498 | 8 | 10 | 16 | | | | | | 492 |
| ENV | KAMYAPPI | 502 | 8 | 23 | 36 | | | | | | 493 |
| ENV | QAMYAPPI | 502 | 8 | 14 | 22 | | | | | | 494 |
| ENV | RAMYAPPI | 502 | 8 | 12 | 19 | | | | | | 495 |
| ENV | QIRCSSNI | 512 | 8 | 11 | 17 | | | | | | 496 |
| ENV | NITGLILT | 519 | 8 | 11 | 17 | | | | | | 497 |
| ENV | NITGLLLT | 519 | 8 | 35 | 55 | | | | | | 498 |
| ENV | ELYKYKVV | 560 | 8 | 56 | 89 | | | | | | 499 |
| ENV | KVVKIEPL | 565 | 8 | 25 | 39 | | | | | | 500 |
| ENV | KIEPLGVA | 568 | 8 | 23 | 37 | | | | | | 501 |
| ENV | PTKAKRRV | 576 | 8 | 22 | 34 | | | | | | 502 |
| ENV | VVEREKRA | 588 | 8 | 32 | 50 | | | | | | 503 |
| ENV | VVQREKRA | 588 | 8 | 17 | 27 | | | | | | 504 |
| ENV | VQREKRAV | 589 | 8 | 17 | 27 | | | | | | 505 |
| ENV | RAVGIGAV | 594 | 8 | 12 | 19 | | | | | | 506 |
| ENV | GALFLGFL | 601 | 8 | 12 | 19 | | | | | | 507 |
| ENV | GAMFLGFL | 601 | 8 | 13 | 20 | | | | | | 508 |
| ENV | GAVFLGFL | 601 | 8 | 22 | 34 | | | | | | 509 |
| ENV | FLGFLGAA | 604 | 8 | 48 | 75 | | | | | | 510 |
| ENV | FLGAAGST | 608 | 8 | 55 | 86 | | | | | | 511 |
| ENV | AAGSTMGA | 611 | 8 | 58 | 91 | | | | | | 512 |
| ENV | STMGAASI | 614 | 8 | 39 | 61 | | | | | | 513 |
| ENV | TMGAASIT | 615 | 8 | 39 | 61 | | | | | | 514 |
| ENV | GAASITLT | 617 | 8 | 39 | 61 | | | | | | 515 |
| ENV | AASITLTV | 618 | 8 | 36 | 56 | | | | | | 516 |
| ENV | SITLTVQA | 620 | 8 | 32 | 50 | | | | | | 517 |
| ENV | LTVQARQL | 623 | 8 | 38 | 59 | | | | | | 518 |
| ENV | TVQARQLL | 624 | 8 | 36 | 56 | | | | | | 519 |
| ENV | RQLLSGIV | 628 | 8 | 49 | 77 | | | | | | 520 |
| ENV | IVQQQNNL | 634 | 8 | 26 | 41 | | | | | | 521 |
| ENV | IVQQQSNL | 634 | 8 | 32 | 50 | | | | | | 522 |
| ENV | VQQQNNLL | 635 | 8 | 26 | 41 | | | | | | 523 |
| ENV | VQQQSNLL | 635 | 8 | 32 | 50 | | | | | | 524 |
| ENV | QQNNLLRA | 637 | 8 | 26 | 41 | | | | | | 525 |
| ENV | QQSNLLRA | 637 | 8 | 26 | 41 | | | | | | 526 |
| ENV | NLLRAIEA | 640 | 8 | 51 | 80 | | | | | | 527 |
| ENV | AIEAQQIIL | 644 | 8 | 49 | 77 | | | | | | 528 |
| ENV | AQQIILLKL | 647 | 8 | 13 | 20 | | | | | | 529 |
| ENV | AQQIILLQL | 647 | 8 | 35 | 55 | | | | | | 530 |
| ENV | AQQHMLQL | 647 | 8 | 10 | 16 | | | | | | 531 |
| ENV | QQIILLKLT | 648 | 8 | 13 | 20 | | | | | | 532 |
| ENV | QQIILLQLT | 648 | 8 | 34 | 53 | | | | | | 533 |
| ENV | QQIIMLQLT | 648 | 8 | 10 | 16 | | | | | | 534 |
| ENV | LQLTVWGI | 652 | 8 | 44 | 69 | | | | | | 535 |
| ENV | TVWGIKQL | 655 | 8 | 59 | 92 | | | | | | 536 |
| ENV | KQLQARVL | 660 | 8 | 41 | 64 | | | | | | 537 |
| ENV | QLQARVLA | 661 | 8 | 41 | 64 | | | | | | 538 |
| ENV | LQARVLAV | 662 | 8 | 33 | 52 | | | | | | 539 |
| ENV | VLAVERYL | 666 | 8 | 34 | 53 | | | | | | 540 |
| ENV | YLKDQQLL | 672 | 8 | 31 | 48 | 0.0001 | | | | | 541 |
| ENV | YLRLDQQLL | 672 | 8 | 18 | 28 | | | | | | 542 |
| ENV | KLICTTAV | 687 | 8 | 19 | 30 | | | | | | 543 |
| ENV | KLICTTNV | 687 | 8 | 17 | 27 | | | | | | 544 |
| ENV | KLICTTTV | 687 | 8 | 12 | 19 | | | | | | 545 |
| ENV | WMEWEREI | 723 | 8 | 12 | 19 | | | | | | 546 |
| ENV | LLALDKWA | 755 | 8 | 19 | 30 | | | | | | 547 |
| ENV | LLELDKWA | 755 | 8 | 21 | 33 | | | | | | 548 |
| ENV | ALDKWASL | 757 | 8 | 11 | 17 | | | | | | 549 |
| ENV | ELDKWASL | 757 | 8 | 18 | 28 | | | | | | 550 |
| ENV | SLWNWFDI | 763 | 8 | 17 | 27 | | | | | | 551 |
| ENV | ITKWLWYI | 770 | 8 | 16 | 25 | | | | | | 552 |
| ENV | ITNWLWYI | 770 | 8 | 19 | 30 | | | | | | 553 |
| ENV | YIKIFIMI | 776 | 8 | 43 | 67 | | | | | | 554 |
| ENV | FIMIVGGL | 780 | 8 | 44 | 69 | | | | | | 555 |
| ENV | IMIVGGLI | 781 | 8 | 35 | 56 | | | | | | 556 |
| ENV | IVGGLIGL | 783 | 8 | 42 | 66 | | | | | | 557 |
| ENV | IVGGLVGL | 783 | 8 | 10 | 16 | | | | | | 558 |
| ENV | GLIGLRII | 786 | 8 | 15 | 23 | | | | | | 559 |
| ENV | GLIGLRIV | 786 | 8 | 32 | 50 | | | | | | 560 |
| ENV | GLRIIFAV | 789 | 8 | 18 | 28 | | | | | | 561 |
| ENV | GLRIVFAV | 789 | 8 | 29 | 45 | | | | | | 562 |
| ENV | IIFAVLSI | 792 | 8 | 15 | 23 | | | | | | 563 |
| ENV | IVFAVLSI | 792 | 8 | 20 | 31 | | | | | | 564 |
| ENV | VLSIVNRV | 796 | 8 | 38 | 59 | | | | | | 565 |
| ENV | PLSFQTLL | 809 | 8 | 10 | 16 | | | | | | 566 |
| ENV | PLSFQTLT | 809 | 8 | 13 | 20 | | | | | | 567 |
| ENV | GLDRPGGT | 823 | 8 | 01 | 33 | | | | | | 568 |
| ENV | RLVNGFLA | 844 | 8 | 13 | 20 | | | | | | 569 |
| ENV | RLVSGFLA | 844 | 8 | 20 | 31 | | | | | | 570 |
| ENV | LVNGFLAL | 845 | 8 | 14 | 22 | | | | | | 571 |
| ENV | LVSGFLAL | 845 | 8 | 19 | 30 | | | | | | 572 |
| ENV | LALAWDDL | 850 | 8 | 25 | 39 | | | | | | 573 |
| ENV | CLFSYIIRL | 861 | 8 | 42 | 66 | | | | | | 574 |
| ENV | RLRDLLLI | 867 | 8 | 13 | 20 | 0.0001 | | | | | 575 |
| ENV | IAARTVEL | 874 | 8 | 12 | 19 | | | | | | 576 |
| ENV | AARTVELL | 876 | 8 | 11 | 17 | | | | | | 577 |
| ENV | ELLGHSSL | 881 | 8 | 09 | 15 | | | | | | 578 |
| ENV | LQYWSQEL | 907 | 8 | 16 | 25 | | | | | | 579 |
| ENV | GQELKNSA | 911 | 8 | 12 | 19 | | | | | | 580 |
| ENV | SQELKNSA | 911 | 8 | 12 | 19 | | | | | | 581 |
| ENV | SAVSLLNA | 917 | 8 | 11 | 17 | | | | | | 582 |
| ENV | AVSLLNAT | 918 | 8 | 11 | 17 | | | | | | 583 |
| ENV | SLLNATAI | 920 | 8 | 14 | 22 | | | | | | 584 |
| ENV | LLNATAIA | 921 | 8 | 15 | 23 | | | | | | 585 |
| ENV | DTIAIAVA | 923 | 8 | 10 | 16 | | | | | | 586 |
| ENV | NATAIAVA | 923 | 8 | 14 | 22 | | | | | | 587 |
| ENV | AIAVAEGT | 926 | 8 | 32 | 50 | | | | | | 588 |
| ENV | VAEGTDRI | 929 | 8 | 19 | 30 | | | | | | 589 |
| ENV | VAEGTDRV | 929 | 8 | 16 | 25 | | | | | | 590 |
| ENV | GTDRVIEV | 932 | 8 | 11 | 17 | | | | | | 591 |
| ENV | ILIIIPRRI | 947 | 8 | 13 | 20 | | | | | | 592 |
| ENV | PTRIRQGL | 951 | 8 | 12 | 19 | | | | | | 593 |
| ENV | RQGLERAL | 955 | 8 | 35 | 55 | | | | | | 594 |
| ENV | VTVYYGVPV | 47 | 9 | 55 | 86 | 0.0003 | | | | | 595 |
| ENV | GVPVWKEAT | 52 | 9 | 22 | 34 | 0.0002 | | | | | 596 |
| ENV | PVWKEATTT | 54 | 9 | 22 | 34 | 0.0002 | | | | | 597 |
| ENV | EATTTLFCA | 58 | 9 | 24 | 38 | 0.0002 | | | | | 598 |
| ENV | TTLFCASDA | 61 | 9 | 52 | 81 | 0.0002 | | | | | 599 |
| ENV | DAKAYDTEV | 70 | 9 | 17 | 27 | 0.0002 | | | | | 601 |
| ENV | DTEVIINVWA | 75 | 9 | 18 | 28 | 0.0001 | | | | | 601 |
| ENV | NVWAIIIACV | 80 | 9 | 49 | 77 | 0.0002 | | | | | 602 |
| ENV | WATIIACVPT | 82 | 9 | 56 | 88 | 0.0002 | | | | | 603 |
| ENV | PTDPNPQEI | 89 | 9 | 25 | 39 | | | | | | 604 |
| ENV | PTDPNPQEV | 89 | 9 | 21 | 33 | 0.0002 | | | | | 605 |
| ENV | MVEQMIIEDI | 113 | 9 | 23 | 36 | 0.0002 | | | | | 606 |
| ENV | QMIIEDIISL | 116 | 9 | 29 | 45 | 0.0023 | | | | | 607 |
| ENV | IISLWDQSL | 121 | 9 | 38 | 59 | 0.0180 | | | | | 608 |
| ENV | VISLWDQSL | 121 | 9 | 10 | 16 | | | | | | 609 |
| ENV | SLKPCVKLT | 128 | 9 | 55 | 86 | 0.0001 | | | | | 610 |
| ENV | CVKLTPLCV | 132 | 9 | 55 | 86 | 0.0002 | | | | | 611 |
| ENV | KLTPLCVTL | 134 | 9 | 52 | 81 | 0.1600 | | | | | 612 |
| ENV | PLCVILNCT | 137 | 9 | 22 | 34 | 0.0005 | | | | | 613 |
| ENV | EIKNCSFNI | 181 | 9 | 13 | 20 | | | | | | 614 |
| ENV | ALFYRLDVV | 202 | 9 | 11 | 17 | | | | | | 615 |
| ENV | VQNNNNSNT | 218 | 9 | 01 | 20 | | | | | | 616 |
| ENV | RLINCNTSA | 236 | 9 | 17 | 27 | | | | | | 617 |
| ENV | LINCNTSAI | 237 | 9 | 15 | 23 | | | | | | 618 |
| ENV | AITQACPKV | 244 | 9 | 13 | 20 | | | | | | 619 |
| ENV | VITQACPKV | 244 | 9 | 15 | 23 | | | | | | 620 |
| ENV | KVSFEPIPI | 252 | 9 | 30 | 47 | | | | | | 621 |
| ENV | CAPAGFAIL | 264 | 9 | 29 | 45 | 0.0001 | | | | | 622 |
| ENV | STVQCTIIGI | 289 | 9 | 51 | 80 | 0.001 | | | | | 623 |
| ENV | CTIIGIKPVV | 294 | 9 | 32 | 50 | | | | | | 624 |
| ENV | CTHGIRPVV | 294 | 9 | 26 | 41 | 0.0001 | | | | | 625 |
| ENV | PVVSTQLLL | 300 | 9 | 60 | 94 | 0.0001 | | | | | 626 |
| ENV | TQLLLNGSL | 304 | 9 | 57 | 89 | | | | | | 627 |
| ENV | QLLLNGSLA | 305 | 9 | 55 | 86 | 0.0001 | | | | | 628 |
| ENV | SLAEEEVVI | 311 | 9 | 13 | 20 | 0.0020 | | | | | 629 |
| ENV | NAKTIIVQL | 329 | 9 | 14 | 22 | | | | | | 630 |
| ENV | ATGDIIGDI | 369 | 9 | 12 | 19 | | | | | | 631 |
| ENV | DIIGDIRQA | 372 | 9 | 12 | 19 | | | | | | 632 |
| ENV | EIIGDIRQA | 372 | 9 | 09 | 15 | | | | | | 633 |
| ENV | GTAGNSSRA | 375 | 9 | 01 | 33 | | | | | | 634 |
| ENV | NTSPRSRVA | 376 | 9 | 01 | 33 | | | | | | 635 |
| ENV | TAGNSSRAA | 376 | 9 | 01 | 33 | | | | | | 636 |
| ENV | DIRQAIICNI | 380 | 9 | 15 | 23 | | | | | | 637 |
| ENV | DIRQAIICNV | 380 | 9 | 10 | 16 | | | | | | 638 |
| ENV | TLPCRIKQI | 484 | 9 | 26 | 41 | | | | | | 639 |
| ENV | QIINMWQEV | 491 | 9 | 17 | 27 | 0.0026 | | | | | 640 |
| ENV | NMWQEVGKA | 494 | 9 | 15 | 23 | 0.0022 | | | | | 641 |
| ENV | GQAMYAPPI | 501 | 9 | 14 | 22 | | | | | | 642 |
| ENV | GQIRCSSNI | 511 | 9 | 11 | 17 | | | | | | 643 |
| ENV | QIRCSSNIT | 512 | 9 | 11 | 17 | 0.0001 | | | | | 644 |
| ENV | NTETNKTET | 537 | 9 | 01 | 17 | | | | | | 645 |
| ENV | NTTGNTTET | 537 | 9 | 01 | 17 | | | | | | 646 |
| ENV | VVKIEPLGV | 566 | 9 | 23 | 36 | | | | | | 647 |
| ENV | PLGVAPTKA | 571 | 9 | 23 | 36 | 0.0001 | | | | | 648 |
| ENV | PTKAKRRVV | 576 | 9 | 22 | 34 | 0.0001 | | | | | 649 |
| ENV | RVVEREKRA | 5117 | 9 | 32 | 50 | | | | | | 650 |
| ENV | RVVQREKRA | 5117 | 9 | 17 | 27 | 0.0001 | | | | | 651 |
| ENV | VVERLKRAV | 588 | 9 | 25 | 39 | | | | | | 652 |
| ENV | VVQREKRAV | 588 | 9 | 16 | 25 | | | | | | 653 |
| ENV | AVGIGAVFL | 595 | 9 | 11 | 17 | | | | | | 654 |
| ENV | ALFLGFLGA | 602 | 9 | 11 | 17 | 0.0950 | | | | | 655 |
| ENV | AMFLGFLGA | 602 | 9 | 12 | 19 | | | | | | 656 |
| ENV | AVFLGFLGA | 602 | 9 | 19 | 30 | | | | | | 657 |
| ENV | FLGAAGSTM | 608 | 9 | 55 | 86 | 0.0190 | | | | | 6511 |
| ENV | GAAGSTMGA | 610 | 9 | 55 | 86 | 0.0009 | | | | | 659 |
| ENV | AAGSTMGAA | 611 | 9 | 45 | 70 | 0.0001 | | | | | 6611 |
| ENV | STMGAASIT | 614 | 9 | 39 | 61 | | | | | | 661 |
| ENV | TMGAASITL | 615 | 9 | 39 | 61 | | | | | | 662 |
| ENV | GAASITLTV | 617 | 9 | 36 | 56 | | | | | | 663 |
| ENV | TLTVQARQL | 622 | 9 | 37 | 58 | | | | | | 664 |
| ENV | LTVQARQLL | 623 | 9 | 36 | 56 | | | | | | 665 |
| ENV | QARQLLSGI | 626 | 9 | 38 | 59 | | | | | | 666 |
| ENV | GIVQQQNNL | 633 | 9 | 26 | 41 | 0.0001 | | | | | 667 |
| ENV | GIVQQQSNL | 633 | 9 | 32 | 50 | | | | | | 668 |
| ENV | IVQQQNNLL | 634 | 9 | 26 | 41 | 0.0001 | | | | | 669 |
| ENV | IVQQQSNLL | 634 | 9 | 32 | 50 | | | | | | 670 |
| ENV | QQQNNLLRA | 636 | 9 | 25 | 39 | | | | | | 671 |
| ENV | QQQSNLLRA | 636 | 9 | 26 | 41 | | | | | | 672 |
| ENV | QQNNLLRAI | 637 | 9 | 26 | 41 | | | | | | 673 |
| ENV | QQSNLLRAI | 637 | 9 | 26 | 41 | | | | | | 674 |
| ENV | RAIEAQQHL | 643 | 9 | 45 | 70 | | | | | | 675 |
| ENV | AIEAQQIILL | 644 | 9 | 48 | 75 | | | | | | 676 |
| ENV | EAQQIILLKL | 646 | 9 | 12 | 19 | | | | | | 677 |
| ENV | EAQQIILLQL | 646 | 9 | 35 | 56 | | | | | | 678 |
| ENV | AQQIILLKLT | 647 | 9 | 13 | 20 | | | | | | 679 |
| ENV | AQQIILLQLT | 647 | 9 | 34 | 53 | | | | | | 680 |
| ENV | AQQIIMLQLT | 647 | 9 | 10 | 16 | | | | | | 681 |
| ENV | QQIILLKLTV | 648 | 9 | 13 | 20 | | | | | | 682 |
| ENV | QQIILLQLTV | 648 | 9 | 34 | 53 | | | | | | 683 |
| ENV | LLKLTVWGI | 651 | 9 | 13 | 20 | | | | | | 684 |
| ENV | LLQLTVWGI | 651 | 9 | 34 | 53 | 0.5100 | 0.0200 | 0.2300 | 0.1500 | 0.0620 | 685 |
| ENV | MLQLTVWGI | 651 | 9 | 10 | 16 | 0.2500 | | | | | 686 |
| ENV | LTVWGIKQL | 654 | 9 | 59 | 92 | 0.0001 | | | | | 687 |
| ENV | GIKQLQARV | 658 | 9 | 40 | 63 | 0.00001 | | | | | 688 |
| ENV | KQLQARVLA | 660 | 9 | 41 | 64 | | | | | | 689 |
| ENV | QLQARVLAV | 661 | 9 | 33 | 52 | 0.0085 | | | | | 690 |
| ENV | RVLAVERYL | 665 | 9 | 33 | 52 | 0.0009 | | | | | 691 |
| ENV | GIWGCSGKL | 680 | 9 | 48 | 75 | 0.0011 | | | | | 692 |
| ENV | QQEKNEQDL | 747 | 9 | 16 | 25 | | | | | | 693 |
| ENV | QQEKNEQEL | 747 | 9 | 18 | 28 | | | | | | 694 |
| ENV | DLLALDKWA | 754 | 9 | 15 | 23 | | | | | | 695 |
| ENV | ELLELDKWA | 754 | 9 | 18 | 28 | 0.0002 | | | | | 696 |
| ENV | LALDKWASL | 756 | 9 | 11 | 17 | | | | | | 697 |
| ENV | SLWNWFDIT | 763 | 9 | 13 | 20 | | | | | | 698 |
| ENV | DITNWLWYI | 769 | 9 | 10 | 16 | | | | | | 699 |
| ENV | WLWYIKIFI | 773 | 9 | 49 | 77 | 0.0360 | | | | | 700 |
| ENV | YIKIFIMIV | 776 | 9 | 39 | 61 | 0.0001 | | | | | 701 |
| ENV | FIMIVGGLI | 780 | 9 | 35 | 55 | | | | | | 702 |
| ENV | MIVGGLIGL | 782 | 9 | 36 | 56 | | | | | | 703 |
| ENV | LIGLRIIFA | 787 | 9 | 16 | 25 | | | | | | 704 |
| ENV | LIGLRIVFA | 787 | 9 | 21 | 33 | | | | | | 705 |
| ENV | GLRIIFAVL | 789 | 9 | 17 | 27 | | | | | | 706 |
| ENV | GLRIVFAVL | 789 | 9 | 28 | 44 | 0.0009 | | | | | 707 |
| ENV | RIIFAYLSI | 791 | 9 | 14 | 22 | | | | | | 708 |
| ENV | RIVFAVLSI | 791 | 9 | 19 | 30 | 0.0002 | | | | | 709 |
| ENV | IIFAVLSIV | 792 | 9 | 15 | 23 | | | | | | 710 |
| ENV | IVFAVLSIV | 792 | 9 | 18 | 28 | 0.0012 | | | | | 711 |
| ENV | AVLSIVNRV | 795 | 9 | 31 | 48 | 0.0130 | | | | | 712 |
| ENV | RVRQGYSPL | 802 | 9 | 55 | 86 | 0.0005 | | | | | 713 |
| ENV | SIRLVNGFL | 842 | 9 | 11 | 17 | | | | | | 714 |
| ENV | SIRLVSGFL | 842 | 9 | 13 | 20 | | | | | | 715 |
| ENV | RLVNGFLAL | 844 | 9 | 12 | 19 | | | | | | 716 |
| ENV | RLVSGFLAL | 844 | 9 | 19 | 30 | | | | | | 717 |
| ENV | LVSGFLALA | 845 | 9 | 16 | 25 | | | | | | 718 |
| ENV | FLALAWDDL | 849 | 9 | 25 | 39 | | | | | | 719 |
| ENV | LAWDDLRSL | 852 | 9 | 20 | 31 | | | | | | 720 |
| ENV | LIAARTVEL | 873 | 9 | 12 | 19 | | | | | | 721 |
| ENV | IAARTVELL | 874 | 9 | 11 | 17 | | | | | | 722 |
| ENV | LLGRRGWEA | 882 | 9 | 10 | 16 | | | | | | 723 |
| ENV | GLRLGWEGL | 892 | 9 | 10 | 32 | | | | | | 724 |
| ENV | LLQYWSQEL | 906 | 9 | 16 | 25 | 0.0270 | | | | | 725 |
| ENV | GQELKNSAI | 911 | 9 | 12 | 19 | | | | | | 726 |
| ENV | SQELKNSAV | 911 | 9 | 10 | 16 | | | | | | 727 |
| ENV | ELKNSAINL | 913 | 9 | 10 | 16 | | | | | | 728 |
| ENV | ELKNSAISL | 913 | 9 | 10 | 16 | | | | | | 729 |
| ENV | ELKNSAVSL | 913 | 9 | 12 | 19 | | | | | | 730 |
| ENV | SAVSLLNAT | 917 | 9 | 11 | 17 | 0.0001 | | | | | 731 |
| ENV | AVSLLNATA | 918 | 9 | 11 | 17 | | | | | | 732 |
| ENV | SLLNATAIA | 920 | 9 | 14 | 22 | | | | | | 733 |
| ENV | LLNATAIAV | 921 | 9 | 15 | 23 | | | | | | 734 |
| ENV | IAIAVAEGT | 925 | 9 | 10 | 16 | | | | | | 735 |
| ENV | TAIAVAEGT | 925 | 9 | 22 | 34 | | | | | | 736 |
| ENV | AVAEGTDRI | 928 | 9 | 16 | 25 | | | | | | 737 |
| ENV | AVAEGTDRV | 928 | 9 | 14 | 22 | 0.0008 | | | | | 738 |
| ENV | VAEGTDRII | 929 | 9 | 18 | 28 | | | | | | 739 |
| ENV | VAEGTDRVI | 929 | 9 | 16 | 25 | 0.0001 | | | | | 740 |
| ENV | AILHIPRRI | 946 | 9 | 12 | 19 | | | | | | 741 |
| ENV | RIRQGLERA | 953 | 9 | 34 | 53 | 0.0003 | | | | | 742 |
| ENV | RQGLERALL | 955 | 9 | 34 | 53 | | | | | | 743 |
| ENV | ILGLVIICSA | 26 | 10 | 10 | 16 | | | | | | 744 |
| ENV | LLGMLMICSA | 26 | 10 | 10 | 16 | | | | | | 745 |
| ENV | QLYATVYAGV | 34 | 10 | 01 | 50 | | | | | | 746 |
| ENV | KLWVTVYYGV | 44 | 10 | 11 | 17 | 0.0150 | | | | | 747 |
| ENV | NLWVTVYYGV | 44 | 10 | 34 | 54 | 0.0160 | | | | | 748 |
| ENV | WVTVYYGVPV | 46 | 10 | 55 | 86 | 0.0009 | | | | | 749 |
| ENV | GVPVWKEATT | 52 | 10 | 22 | 34 | 0.0001 | | | | | 750 |
| ENV | PVWKEATTTL | 54 | 10 | 22 | 34 | 0.0001 | | | | | 751 |
| ENV | KTTLFCASDA | 60 | 10 | 12 | 19 | | | | | | 752 |
| ENV | TTTLFCASDA | 60 | 10 | 24 | 38 | 0.0001 | | | | | 753 |
| ENV | TLFCASDAKA | 64 | 10 | 46 | 72 | 0.0006 | | | | | 754 |
| ENV | CASDAKAYDT | 67 | 10 | 19 | 30 | 0.0001 | | | | | 755 |
| ENV | KAYDTEVIINV | 72 | 10 | 17 | 27 | 0.0013 | | | | | 756 |
| ENV | DTEYIINVWAT | 75 | 10 | 18 | 28 | 0.0001 | | | | | 757 |
| ENV | EVIINVWATIIA | 77 | 10 | 35 | 55 | 0.0001 | | | | | 758 |
| ENV | PTDPNPQEVV | 89 | 10 | 13 | 20 | | | | | | 759 |
| ENV | NMVEQMIIEDI | 112 | 10 | 20 | 31 | 0.0001 | | | | | 760 |
| ENV | MVEQMIIEDII | 113 | 10 | 23 | 36 | 0.0001 | | | | | 761 |
| ENV | EQMIIEDIISL | 115 | 10 | 22 | 34 | | | | | | 762 |
| ENV | DIISLWDQSL | 120 | 10 | 38 | 59 | 0.0001 | | | | | 763 |
| ENV | DVISLWDQSL | 120 | 10 | 10 | 16 | | | | | | 764 |
| ENV | DQSLKPCVKL | 126 | 10 | 47 | 73 | | | | | | 765 |
| ENV | CVKLTPLCVT | 132 | 10 | 53 | 83 | 0.0001 | | | | | 766 |
| ENV | STSNSSNSST | 159 | 10 | 01 | 50 | | | | | | 767 |
| ENV | VTSTGNSAGT | 161 | 10 | 01 | 20 | | | | | | 768 |
| ENV | EIKNCSFNIT | 181 | 10 | 12 | 19 | | | | | | 769 |
| ENV | SVQNNNNSNT | 217 | 10 | 01 | 33 | | | | | | 770 |
| ENV | RLINCNTSAI | 236 | 10 | 15 | 24 | | | | | | 771 |
| ENV | LINCNTSAIT | 237 | 10 | 14 | 22 | | | | | | 772 |
| ENV | SAITQACPKV | 243 | 10 | 13 | 20 | | | | | | 773 |
| ENV | SVITQACPKV | 243 | 10 | 15 | 23 | | | | | | 774 |
| ENV | PIPIHYCAPA | 258 | 10 | 36 | 56 | 0.0002 | | | | | 775 |
| ENV | PIPIHYCTPA | 258 | 10 | 18 | 28 | | | | | | 776 |
| ENV | GTGPCKNVST | 281 | 10 | 12 | 19 | | | | | | 777 |
| ENV | CTNVSYVQCT | 285 | 10 | 13 | 20 | | | | | | 778 |
| ENV | VQCTIIGIKPV | 292 | 10 | 32 | 50 | | | | | | 779 |
| ENV | VQCTIIGIRPV | 292 | 10 | 25 | 39 | | | | | | 780 |
| ENV | GIKPVVSTQL | 297 | 10 | 33 | 52 | | | | | | 781 |
| ENV | GIRPVVSTQL | 297 | 10 | 26 | 41 | 0.0002 | | | | | 782 |
| ENV | STQLLLNGSL | 303 | 10 | 57 | 89 | 0.0001 | | | | | 783 |
| ENV | TQLLLNGSLA | 304 | 10 | 55 | 86 | | | | | | 784 |
| ENV | RIGPGQTFYA | 357 | 10 | 10 | 16 | | | | | | 785 |
| ENV | GIGPGQTFYA | 360 | 10 | 01 | 33 | | | | | | 786 |
| ENV | SIGSGQAFYV | 360 | 10 | 01 | 33 | | | | | | 787 |
| ENV | YATUDIIGDI | 368 | 10 | 11 | 17 | | | | | | 788 |
| ENV | GTAGNSSRAA | 375 | 10 | 01 | 33 | | | | | | 789 |
| ENV | MQNGTNITST | 458 | 10 | 01 | 17 | | | | | | 790 |
| ENV | NANITIPCRI | 478 | 10 | 01 | 50 | | | | | | 791 |
| ENV | ITLPCRIKQI | 483 | 10 | 25 | 39 | | | | | | 792 |
| ENV | TLPCRIKQII | 484 | 10 | 15 | 23 | | | | | | 793 |
| ENV | TLPCRIKQIV | 484 | 10 | 10 | 16 | | | | | | 794 |
| ENV | KQIINNWQEV | 490 | 10 | 17 | 27 | | | | | | 795 |
| ENV | NMWQEVGKAM | 494 | 10 | 15 | 23 | 0.0004 | | | | | 796 |
| ENV | WQEVGKAMYA | 496 | 10 | 18 | 28 | | | | | | 797 |
| ENV | WQRVGQAMYA | 496 | 10 | 10 | 16 | | | | | | 798 |
| ENV | GQIRCSSNIT | 511 | 10 | 11 | 17 | | | | | | 799 |
| ENV | EIFRPGGGDM | 544 | 10 | 17 | 27 | 0.0001 | | | | | 800 |
| ENV | ETFRPGGGDM | 544 | 10 | 21 | 33 | | | | | | 801 |
| ENV | DMRDNWRSEL | 552 | 10 | 37 | 58 | 0.0001 | | | | | 802 |
| ENV | ELYKYKVVEI | 560 | 10 | 13 | 21 | | | | | | 803 |
| ENV | ELYKYKVVKI | 560 | 10 | 29 | 46 | | | | | | 804 |
| ENV | KVVKIEPLGV | 565 | 10 | 23 | 36 | | | | | | 805 |
| ENV | VYKIEPLGVA | 566 | 10 | 23 | 36 | | | | | | 806 |
| ENV | KIEPLGVAPT | 568 | 10 | 23 | 37 | | | | | | 807 |
| ENV | VAPTKAKRRV | 574 | 10 | 17 | 27 | 0.0001 | | | | | 808 |
| ENV | STRTIIREKRA | 586 | 10 | 01 | 50 | | | | | | 809 |
| ENV | RVVEREKRAV | 587 | 10 | 25 | 39 | | | | | | 810 |
| ENV | RVVQREKRAV | 587 | 10 | 16 | 25 | | | | | | 811 |
| ENV | RAVGIGAVFL | 594 | 10 | 11 | 17 | | | | | | 812 |
| ENV | GIGAVFLGFL | 598 | 10 | 11 | 18 | | | | | | 813 |
| ENV | MLGAMFLGFL | 599 | 10 | 04 | 36 | | | | | | 814 |
| ENV | TIGAMFLGFL | 599 | 10 | 03 | 27 | | | | | | 815 |
| ENV | GALFLGFLGA | 601 | 10 | 11 | 17 | 0.0003 | | | | | 816 |
| ENV | GAMFLGFLGA | 601 | 10 | 12 | 19 | | | | | | 817 |
| ENV | GAVFLGFLGA | 601 | 10 | 19 | 30 | | | | | | 818 |
| ENV | ALFLGFLGAA | 602 | 10 | 11 | 17 | 0.5000 | | | | | 819 |
| ENV | AMFLGFLGAA | 602 | 10 | 12 | 19 | | | | | | 820 |
| ENV | AVFLGFLGAA | 602 | 10 | 19 | 30 | | | | | | 821 |
| ENV | GAAGSTMGAA | 610 | 10 | 42 | 66 | 0.0004 | | | | | 822 |
| ENV | STMGAASITL | 614 | 10 | 39 | 61 | | | | | | 823 |
| ENV | TMGAASITLT | 615 | 10 | 39 | 61 | | | | | | 824 |
| ENV | AASITLTVQA | 618 | 10 | 28 | 44 | | | | | | 825 |
| ENV | ITLTVQARQL | 621 | 10 | 27 | 42 | | | | | | 826 |
| ENV | TLTVQARQLL | 622 | 10 | 35 | 55 | | | | | | 827 |
| ENV | VQARQLLSGI | 625 | 10 | 36 | 56 | | | | | | 828 |
| ENV | QARQLLSGIV | 626 | 10 | 38 | 59 | | | | | | 829 |
| ENV | GIVQQQNNLL | 633 | 10 | 26 | 41 | 0.0002 | | | | | 830 |
| ENV | GIVQQQSNLL | 633 | 10 | 32 | 50 | | | | | | 831 |
| ENV | VQQQNNLLRA | 635 | 10 | 25 | 39 | | | | | | 832 |
| ENV | VQQQSNLLRA | 635 | 10 | 26 | 41 | | | | | | 833 |
| ENV | QQQNNLLRAI | 636 | 10 | 25 | 39 | | | | | | 834 |
| ENV | QQQSNLLRAI | 636 | 10 | 26 | 41 | | | | | | 835 |
| ENV | RAIEAQQIILL | 643 | 10 | 44 | 69 | | | | | | 836 |
| ENV | EAQQIILLKLT | 646 | 10 | 12 | 19 | | | | | | 837 |
| ENV | EAQQIILLQLT | 646 | 10 | 34 | 54 | | | | | | 838 |
| ENV | AQQIILLKLTV | 647 | 10 | 13 | 20 | | | | | | 839 |
| ENV | AQQIILLQLTV | 647 | 10 | 34 | 53 | | | | | | 840 |
| ENV | IILLKLTVWGI | 650 | 10 | 13 | 20 | | | | | | 841 |
| ENV | IILLQLTVWGI | 650 | 10 | 34 | 53 | | | | | | 842 |
| ENV | KLTVWGIKQL | 653 | 10 | 13 | 20 | | | | | | 843 |
| ENV | QLTVWGIKQL | 653 | 10 | 44 | 69 | 0.0015 | | | | | 844 |
| ENV | TVWGIKQLQA | 655 | 10 | 49 | 77 | 0.0150 | | | | | 845 |
| ENV | GIKQLQARVL | 658 | 10 | 40 | 63 | 0.0002 | | | | | 846 |
| ENV | KQLQARVLAV | 660 | 10 | 33 | 52 | | | | | | 847 |
| ENV | VLKDQQLLGI | 672 | 10 | 27 | 42 | | | | | | 848 |
| ENV | YLRDQQLLGI | 672 | 10 | 18 | 28 | | | | | | 849 |
| ENV | GIWGCSGKLI | 680 | 10 | 48 | 75 | 0.0004 | | | | | 850 |
| ENV | MTWMEWERLEI | 721 | 10 | 12 | 19 | | | | | | 851 |
| ENV | NQQEKNEQDL | 746 | 10 | 13 | 20 | | | | | | 852 |
| ENV | NQQEKNEQEL | 746 | 10 | 15 | 23 | | | | | | 853 |
| ENV | QQEKNEQDLL | 747 | 10 | 16 | 25 | | | | | | 854 |
| ENV | QQEKNEQELL | 747 | 10 | 18 | 28 | | | | | | 855 |
| ENV | LLALDKWASL | 755 | 10 | 11 | 17 | | | | | | 856 |
| ENV | LLELDKWASL | 755 | 10 | 18 | 28 | 0.0024 | | | | | 857 |
| ENV | WASLWNWFDI | 761 | 10 | 17 | 27 | | | | | | 858 |
| ENV | ITKWLWYIKI | 770 | 10 | 15 | 23 | | | | | | 859 |
| ENV | ITNWLWYIKI | 770 | 10 | 14 | 22 | 0.0002 | | | | | 860 |
| ENV | WLWYIKIFIM | 773 | 10 | 43 | 67 | 0.0001 | | | | | 861 |
| ENV | KIFIMIVGGL | 778 | 10 | 38 | 59 | 0.0003 | | | | | 862 |
| ENV | IMIVGGLIGL | 781 | 10 | 34 | 54 | | | | | | 863 |
| ENV | IVGGLIGLRI | 783 | 10 | 42 | 66 | | | | | | 864 |
| ENV | GLIGLRIIFA | 786 | 10 | 15 | 23 | | | | | | 865 |
| ENV | GLIGLRIVFA | 786 | 10 | 21 | 33 | | | | | | 866 |
| ENV | LIGLRIIFAV | 787 | 10 | 16 | 25 | | | | | | 867 |
| ENV | LIGLRIVFAV | 787 | 10 | 21 | 33 | | | | | | 868 |
| ENV | RIIFAVLSIV | 791 | 10 | 14 | 22 | | | | | | 869 |
| ENV | RIVFAVLSIV | 791 | 10 | 17 | 27 | 0.0007 | | | | | 870 |
| ENV | FAVLSIVNRV | 794 | 10 | 31 | 48 | 0.0002 | | | | | 871 |
| ENV | SIRLVSGFLA | 842 | 10 | 12 | 19 | | | | | | 872 |
| ENV | RLVSGFLALA | 844 | 10 | 16 | 25 | | | | | | 873 |
| ENV | ALAWDDLRSL | 851 | 10 | 19 | 30 | | | | | | 874 |
| ENV | NLCLFSYIIRL | 859 | 10 | 11 | 17 | | | | | | 875 |
| ENV | SLCLFSYHRL | 8S9 | 10 | 31 | 48 | | | | | | 876 |
| ENV | LIAARTVELL | 873 | 10 | 11 | 17 | | | | | | 877 |
| ENV | ELLGRRGWEA | 881 | 10 | 10 | 16 | | | | | | 878 |
| ENV | LLGRRGWEAL | 882 | 10 | 09 | 15 | | | | | | 879 |
| ENV | RLGWEGLKYL | 894 | 10 | 09 | 29 | | | | | | 880 |
| ENV | NLLQYWSQEL | 905 | 10 | 16 | 25 | 0.0059 | | | | | 881 |
| ENV | ELKNSAVSLL | 913 | 10 | 10 | 16 | | | | | | 882 |
| ENV | SAVSLLNATA | 917 | 10 | 11 | 17 | | | | | | 883 |
| ENV | AVSLLNATAI | 918 | 10 | 11 | 17 | | | | | | 884 |
| ENV | SLLNATAIAV | 920 | 10 | 14 | 22 | 0.0650 | 0.0074 | 0.0390 | 0.0600 | 0.0390 | 885 |
| ENV | LLNATAIAVA | 921 | 10 | 14 | 22 | 0.0740 | | | | | 886 |
| ENV | ATAIAVAEGT | 924 | 10 | 14 | 22 | | | | | | 887 |
| ENV | IAVAEGTDRI | 927 | 10 | 16 | 25 | | | | | | 888 |
| ENV | IAVAEGTDRV | 927 | 10 | 14 | 22 | 0.0001 | | | | | 889 |
| ENV | AVAEGTDRII | 928 | 10 | 15 | 23 | | | | | | 890 |
| ENV | AVAEGTDRVI | 928 | 10 | 14 | 22 | 0.0004 | | | | | 891 |
| ENV | RAILIIIRRI | 945 | 10 | 12 | 19 | | | | | | 892 |
| ENV | IIIPRRIRQGL | 949 | 10 | 13 | 21 | | | | | | 893 |
| ENV | NIPRRIRQGL | 949 | 10 | 11 | 17 | | | | | | 894 |
| ENV | RIRQGLERAL | 953 | 10 | 34 | 53 | 0.0001 | | | | | 895 |
| ENV | LILGLVIICSA | 21 | 11 | 09 | 15 | | | | | | 896 |
| ENV | KQLYATVYSGV | 34 | 11 | 01 | 50 | | | | | | 897 |
| ENV | GVPVWKEATTT | 52 | 11 | 22 | 34 | | | | | | 898 |
| ENV | ATTLFCASDA | 59 | 11 | 23 | 36 | | | | | | 899 |
| ENV | TTLFCASDAKA | 61 | 11 | 44 | 69 | | | | | | 900 |
| ENV | NVWATIIACVPT | 80 | 11 | 48 | 75 | | | | | | 901 |
| ENV | CVPTDPNPQEI | 87 | 11 | 25 | 39 | | | | | | 902 |
| ENV | CVPTDPNPQEV | 87 | 11 | 21 | 33 | | | | | | 903 |
| ENV | PTDPNPQEVVL | 89 | 11 | 12 | 19 | | | | | | 904 |
| ENV | NMWKNNMVEQM | 107 | 11 | 30 | 47 | | | | | | 905 |
| ENV | NMVEQMHEDII | 112 | 11 | 20 | 31 | | | | | | 906 |
| ENV | SLWDQSLKPCV | 123 | 11 | 47 | 75 | | | | | | 907 |
| ENV | DQSLKPCVKLT | 126 | 11 | 47 | 73 | | | | | | 908 |
| ENV | SLKPCVKLTPL | 128 | 11 | 54 | 84 | | | | | | 909 |
| ENV | CVKLTPLCVTL | 132 | 11 | 52 | 81 | | | | | | 910 |
| ENV | LTPLCVTLNCT | 135 | 11 | 22 | 34 | | | | | | 911 |
| ENV | EIKNCSFNITT | 181 | 11 | 11 | 17 | | | | | | 912 |
| ENV | RLINCNTSAIT | 236 | 11 | 14 | 22 | | | | | | 913 |
| ENV | QACPKVSFEPI | 248 | 11 | 30 | 47 | | | | | | 914 |
| ENV | PIIIYCAPAGFA | 260 | 11 | 27 | 42 | | | | | | 915 |
| ENV | PIIIYCTPAGFA | 260 | 11 | 10 | 16 | | | | | | 916 |
| ENV | GTGPCKNVSTV | 281 | 11 | 12 | 19 | | | | | | 917 |
| ENV | NVSTVQCTIIGI | 287 | 11 | 51 | 80 | | | | | | 918 |
| ENV | TVQCTIIGIKPV | 290 | 11 | 28 | 44 | | | | | | 919 |
| ENV | TVQCTIIGIRPV | 290 | 11 | 22 | 34 | | | | | | 920 |
| ENV | VQCTHGIKPVV | 292 | 11 | 31 | 48 | | | | | | 921 |
| ENV | VQCTHGIRPVV | 292 | 11 | 25 | 39 | | | | | | 922 |
| ENV | CTHGIKPVVST | 294 | 11 | 32 | 50 | | | | | | 923 |
| ENV | CTHGIRPVVST | 294 | 11 | 26 | 41 | | | | | | 924 |
| ENV | GIKPVVSTQLL | 297 | 11 | 33 | 52 | | | | | | 925 |
| ENV | GIRPVVSTQLL | 297 | 11 | 26 | 41 | | | | | | 926 |
| ENV | STQLLLNGSLA | 303 | 11 | 55 | 86 | | | | | | 927 |
| ENV | LLNGSLAEEEV | 307 | 11 | 16 | 25 | | | | | | 928 |
| ENV | EINCTRPNNNT | 342 | 11 | 10 | 16 | | | | | | 929 |
| ENV | RIGPGQTFYAT | 357 | 11 | 10 | 16 | | | | | | 930 |
| ENV | GIGPGQTFYAT | 360 | 11 | 01 | 33 | | | | | | 931 |
| ENV | SIGSGQAFYVT | 360 | 11 | 01 | 33 | | | | | | 932 |
| ENV | EMHTNYTSNDT | 458 | 11 | 01 | 17 | | | | | | 933 |
| ENV | NITLPCRIKQI | 482 | 11 | 11 | 17 | | | | | | 934 |
| ENV | TITLPCRIKQI | 482 | 11 | 13 | 20 | | | | | | 935 |
| ENV | ITLPCRIKQII | 483 | 11 | 15 | 23 | | | | | | 936 |
| ENV | IINMWQEVGKA | 492 | 11 | 12 | 19 | | | | | | 937 |
| ENV | EVGKAMYAPPI | 498 | 11 | 18 | 28 | | | | | | 938 |
| ENV | RVGQAMYAPPI | 498 | 11 | 10 | 16 | | | | | | 939 |
| ENV | QIRCSSNITGL | 512 | 11 | 11 | 17 | | | | | | 940 |
| ENV | KVVKIEPLGVA | 565 | 11 | 23 | 36 | | | | | | 941 |
| ENV | GVAPTKAKRRV | 573 | 11 | 17 | 27 | | | | | | 942 |
| ENV | VAPTKAKRRVV | 574 | 11 | 17 | 27 | | | | | | 943 |
| ENV | NIIITPIIREKRA | 586 | 11 | 01 | 50 | | | | | | 944 |
| ENV | STRTIIREKRAV | 586 | 11 | 01 | 50 | | | | | | 945 |
| ENV | VVEREKRAVGI | 588 | 11 | 11 | 17 | | | | | | 946 |
| ENV | GALFLGFLGAA | 601 | 11 | 11 | 17 | | | | | | 947 |
| ENV | GAMFLGFLGAA | 601 | 11 | 12 | 19 | | | | | | 948 |
| ENV | GAVFLGFLGAA | 601 | 11 | 19 | 30 | | | | | | 949 |
| ENV | FLGFLGAAGST | 604 | 11 | 48 | 75 | | | | | | 950 |
| ENV | FLGAAGSTMGA | 608 | 11 | 55 | 86 | | | | | | 951 |
| ENV | AAGSTMGAASI | 611 | 11 | 34 | 53 | | | | | | 952 |
| ENV | STMGAASITLT | 614 | 11 | 39 | 61 | | | | | | 953 |
| ENV | TMGAASITLTV | 615 | 11 | 36 | 56 | | | | | | 954 |
| ENV | GAASITLTVQA | 617 | 11 | 28 | 44 | | | | | | 955 |
| ENV | SITLTVQARQL | 620 | 11 | 27 | 42 | | | | | | 956 |
| ENV | ITLTVQARQLL | 621 | 11 | 27 | 42 | | | | | | 957 |
| ENV | TVQARQLLSGI | 624 | 11 | 36 | 56 | | | | | | 958 |
| ENV | VQARQLLSGIV | 625 | 11 | 36 | 56 | | | | | | 959 |
| ENV | IVQQQNNLLRA | 634 | 11 | 25 | 39 | | | | | | 960 |
| ENV | IVQQQSNLLRA | 634 | 11 | 26 | 41 | | | | | | 961 |
| ENV | VQQQNNLLRAI | 635 | 11 | 25 | 39 | | | | | | 962 |
| ENV | VQQQSNLLRAI | 635 | 11 | 26 | 41 | | | | | | 963 |
| ENV | QQNNLLRAIEA | 637 | 11 | 26 | 41 | | | | | | 964 |
| ENV | QQSNLLRAIEA | 637 | 11 | 23 | 36 | | | | | | 965 |
| ENV | LLRAIEAQQIIL | 641 | 11 | 45 | 70 | | | | | | 966 |
| ENV | AIEAQQIILLKL | 644 | 11 | 12 | 19 | | | | | | 967 |
| ENV | AIEAQQIILLQL | 644 | 11 | 35 | 55 | | | | | | 968 |
| ENV | EAQQHLLKLTV | 646 | 11 | 12 | 19 | | | | | | 969 |
| ENV | EAQQIILLQLTV | 646 | 11 | 34 | 54 | | | | | | 970 |
| ENV | LQLTVWGIKQL | 652 | 11 | 44 | 69 | | | | | | 971 |
| ENV | LTVWGIKQLQA | 654 | 11 | 49 | 77 | | | | | | 972 |
| ENV | GIKQLQARVLA | 658 | 11 | 40 | 63 | | | | | | 973 |
| ENV | QARVLAVERYL | 663 | 11 | 33 | 52 | | | | | | 974 |
| ENV | AVERYLKDQQL | 668 | 11 | 23 | 36 | | | | | | 975 |
| ENV | AVERYLRDQQL | 668 | 11 | 11 | 17 | | | | | | 976 |
| ENV | LLGIWGCSGKL | 678 | 11 | 46 | 72 | | | | | | 977 |
| ENV | NMTWMEWEREI | 720 | 11 | 12 | 19 | | | | | | 978 |
| ENV | NQQEKNEQDLL | 746 | 11 | 13 | 20 | | | | | | 979 |
| ENV | NQQEKNEQELL | 746 | 11 | 15 | 23 | | | | | | 980 |
| ENV | QQEKNEQDLLA | 747 | 11 | 16 | 25 | | | | | | 981 |
| ENV | EQDLLALDKWA | 752 | 11 | 12 | 19 | | | | | | 982 |
| ENV | EQELLELDKWA | 752 | 11 | 11 | 17 | | | | | | 983 |
| ENV | ELLELDKWASL | 754 | 11 | 15 | 23 | | | | | | 984 |
| ENV | WASLWNWFDIT | 761 | 11 | 13 | 20 | | | | | | 985 |
| ENV | WLWYIKIFIMI | 773 | 11 | 43 | 67 | | | | | | 986 |
| ENV | KIFIMIVGGLI | 778 | 11 | 31 | 48 | | | | | | 987 |
| ENV | FIMIVGGLIGL | 780 | 11 | 34 | 53 | | | | | | 988 |
| ENV | MIVGGLIGLRI | 782 | 11 | 36 | 56 | | | | | | 989 |
| ENV | IVGGLIGLRII | 783 | 11 | 12 | 19 | | | | | | 990 |
| ENV | IVGGLIGLRIV | 783 | 11 | 30 | 47 | | | | | | 991 |
| ENV | GLIGLRIIFAV | 786 | 11 | 15 | 23 | | | | | | 992 |
| ENV | GLIGLRIVFAV | 786 | 11 | 21 | 33 | | | | | | 993 |
| ENV | LIGLRIIFAVL | 787 | 11 | 15 | 23 | | | | | | 994 |
| ENV | LIGLRIVFAVL | 787 | 11 | 20 | 31 | | | | | | 995 |
| ENV | GLRIIFAVLSI | 789 | 11 | 14 | 22 | | | | | | 996 |
| ENV | GLRIVFAVLSI | 789 | 11 | 19 | 30 | | | | | | 997 |
| ENV | RQGYSPLSFQT | 804 | 11 | 45 | 70 | | | | | | 998 |
| ENV | SIRLVSGFLAL | 842 | 11 | 11 | 17 | | | | | | 999 |
| ENV | LALAWDDLRSL | 850 | 11 | 19 | 30 | | | | | | 1000 |
| ENV | LAWDDLRSLCL | 852 | 11 | 20 | 31 | | | | | | 1001 |
| ENV | CLFSYIIRLRDL | 861 | 11 | 20 | 31 | | | | | | 1002 |
| ENV | ELLGRRGWEAL | 881 | 11 | 09 | 15 | | | | | | 1003 |
| ENV | SQELKNSAVSL | 911 | 11 | 10 | 16 | | | | | | 1004 |
| ENV | SAVSLLNATAI | 917 | 11 | 11 | 17 | | | | | | 1005 |
| ENV | AVSLLNATAIA | 918 | 11 | 11 | 17 | | | | | | 1006 |
| ENV | SLLNATAIAVA | 920 | 11 | 13 | 20 | 0.2700 | | | | | 1007 |
| ENV | NATAIAVAEGT | 923 | 11 | 13 | 20 | | | | | | 1008 |
| ENV | AIAVAEGTDRI | 926 | 11 | 16 | 25 | | | | | | 1009 |
| ENV | AIAVAEGTDRV | 926 | 11 | 14 | 22 | | | | | | 1010 |
| ENV | IAVAEGTDRII | 927 | 11 | 15 | 23 | | | | | | 1011 |
| ENV | IAVAEGTDRVI | 927 | 11 | 14 | 22 | | | | | | 1012 |
| ENV | PTRIRQGLERA | 951 | 11 | 11 | 17 | | | | | | 1013 |
| ENV | RIRQGLERALL | 953 | 11 | 33 | 52 | | | | | | 1014 |
| GAG | SVLSGGEL | 6 | 8 | 11 | 17 | | | | | | 1015 |
| GAG | SVLSGGKL | 6 | 8 | 28 | 44 | | | | | | 1016 |
| GAG | KLDAWEKI | 12 | 8 | 18 | 28 | | | | | | 1017 |
| GAG | KLDKWEKI | 12 | 8 | 10 | 16 | | | | | | 1018 |
| GAG | DAWEKIRL | 14 | 8 | 17 | 27 | | | | | | 1019 |
| GAG | KLKHIVWA | 31 | 8 | 13 | 20 | | | | | | 1020 |
| GAG | RLKIILVWA | 31 | 8 | 17 | 27 | | | | | | 1021 |
| GAG | IVWASREL | 35 | 8 | 21 | 33 | | | | | | 1022 |
| GAG | LVWASREL | 35 | 8 | 36 | 56 | | | | | | 1023 |
| GAG | FALNPGLL | 46 | 8 | 22 | 34 | | | | | | 1024 |
| GAG | FAVNPGLL | 46 | 8 | 16 | 25 | | | | | | 1025 |
| GAG | QLQPALQT | 65 | 8 | 17 | 27 | | | | | | 1026 |
| GAG | QLQPSLQT | 65 | 8 | 15 | 23 | | | | | | 1027 |
| GAG | LQTGSEEL | 70 | 8 | 17 | 27 | | | | | | 1028 |
| GAG | GTEELRSL | 73 | 8 | 12 | 19 | | | | | | 1029 |
| GAG | ELRSLYNT | 76 | 8 | 17 | 27 | | | | | | 1030 |
| GAG | SLFNTVAT | 79 | 8 | 16 | 25 | | | | | | 1031 |
| GAG | SLYNTVAT | 79 | 8 | 22 | 34 | | | | | | 1032 |
| GAG | TYATLYCV | 83 | 8 | 41 | 64 | | | | | | 1033 |
| GAG | DVKDTKEA | 95 | 8 | 11 | 17 | | | | | | 1034 |
| GAG | EVKDTKEA | 95 | 8 | 22 | 34 | | | | | | 1035 |
| GAG | AQQAAADT | 119 | 8 | 10 | 16 | | | | | | 1036 |
| GAG | AQQAAAAT | 132 | 8 | 01 | 33 | | | | | | 1037 |
| GAG | KVSQNYPI | 148 | 8 | 15 | 27 | | | | | | 1038 |
| GAG | QVSQNYPI | 148 | 8 | 27 | 48 | | | | | | 1039 |
| GAG | VQNAQGQM | 156 | 8 | 21 | 33 | | | | | | 1040 |
| GAG | VQNLQGQM | 156 | 8 | 29 | 45 | | | | | | 1041 |
| GAG | GQMVIIQAI | 161 | 8 | 28 | 44 | | | | | | 1042 |
| GAG | IIQAISPRT | 165 | 8 | 29 | 45 | | | | | | 1043 |
| GAG | IIQALSPRT | 165 | 8 | 11 | 17 | | | | | | 1044 |
| GAG | QAISPRTL | 166 | 8 | 29 | 45 | | | | | | 1045 |
| GAG | QALSPRTL | 166 | 8 | 11 | 17 | | | | | | 1046 |
| GAG | TLNAWVKV | 172 | 8 | 61 | 95 | | | | | | 1047 |
| GAG | KAFSPEVI | 183 | 8 | 50 | 78 | | | | | | 1048 |
| GAG | EVIPMFSA | 188 | 8 | 46 | 72 | | | | | | 1049 |
| GAG | EVIPMFTA | 188 | 8 | 14 | 22 | | | | | | 1050 |
| GAG | VIPMFSAL | 189 | 8 | 46 | 72 | | | | | | 1051 |
| GAG | VIPMFTAL | 189 | 8 | 14 | 22 | | | | | | 1052 |
| GAG | FTALSEGA | 193 | 8 | 15 | 23 | | | | | | 1053 |
| GAG | SALSEGAT | 194 | 8 | 44 | 69 | | | | | | 1054 |
| GAG | TALSEGAT | 194 | 8 | 15 | 23 | | | | | | 1055 |
| GAG | ATPQDLNM | 200 | 8 | 12 | 19 | | | | | | 1056 |
| GAG | ATPQDLNT | 200 | 8 | 42 | 66 | | | | | | 1057 |
| GAG | PQDLNMML | 202 | 8 | 12 | 19 | | | | | | 1058 |
| GAG | PQDLNTML | 202 | 8 | 43 | 67 | | | | | | 1059 |
| GAG | DLNMMLNI | 204 | 8 | 12 | 19 | | | | | | 1060 |
| GAG | DLNTMLNT | 204 | 8 | 44 | 69 | | | | | | 1061 |
| GAG | NIVGGIIQA | 210 | 8 | 12 | 19 | | | | | | 1062 |
| GAG | NTVGGIIQA | 210 | 8 | 47 | 73 | | | | | | 1063 |
| GAG | IVGGIIQAA | 211 | 8 | 12 | 19 | | | | | | 1064 |
| GAG | TVGGIIQAA | 211 | 8 | 47 | 73 | | | | | | 1065 |
| GAG | HQAAMQML | 215 | 8 | 61 | 95 | | | | | | 1066 |
| GAG | AMQMLKDT | 218 | 8 | 33 | 52 | | | | | | 1067 |
| GAG | AMQMLKET | 218 | 8 | 26 | 41 | | | | | | 1068 |
| GAG | MQMLKDTI | 219 | 8 | 33 | 52 | | | | | | 1069 |
| GAG | MQMLKETI | 219 | 8 | 26 | 41 | | | | | | 1070 |
| GAG | DTINEEAA | 224 | 8 | 33 | 52 | | | | | | 1071 |
| GAG | ETINEEAA | 224 | 8 | 22 | 34 | | | | | | 1072 |
| GAG | EAAEWDRL | 229 | 8 | 39 | 61 | | | | | | 1073 |
| GAG | EAAEWDRV | 229 | 8 | 15 | 23 | | | | | | 1074 |
| GAG | PVHAGPIA | 238 | 8 | 19 | 30 | | | | | | 1075 |
| GAG | DIAGTTST | 256 | 8 | 55 | 86 | | | | | | 1076 |
| GAG | IAGTTSTL | 257 | 8 | 48 | 75 | | | | | | 1077 |
| GAG | STLQEQIA | 262 | 8 | 12 | 19 | | | | | | 1078 |
| GAG | LQEQIAWM | 264 | 8 | 14 | 22 | | | | | | 1079 |
| GAG | LQEQIGWM | 264 | 8 | 29 | 45 | | | | | | 1080 |
| GAG | WMTNNPPI | 270 | 8 | 20 | 31 | | | | | | 1081 |
| GAG | WMTSNPPI | 270 | 8 | 16 | 25 | | | | | | 1082 |
| GAG | DIYKRWII | 284 | 8 | 17 | 27 | | | | | | 1083 |
| GAG | EIYKRWII | 284 | 8 | 39 | 61 | | | | | | 1084 |
| GAG | IILGLNKI | 290 | 8 | 57 | 89 | | | | | | 1085 |
| GAG | ILGLNKIV | 291 | 8 | 58 | 91 | | | | | | 1086 |
| GAG | GLNKIVRM | 293 | 8 | 60 | 94 | | | | | | 1087 |
| GAG | IVRMYSPT | 297 | 8 | 15 | 23 | | | | | | 1088 |
| GAG | IVRMYSPV | 297 | 8 | 42 | 66 | | | | | | 1089 |
| GAG | RMYSPTSI | 299 | 8 | 14 | 22 | | | | | | 1090 |
| GAG | RMYSPVSI | 299 | 8 | 40 | 63 | | | | | | 1091 |
| GAG | YVDRFFKT | 320 | 8 | 28 | 44 | | | | | | 1092 |
| GAG | YVDRFYKT | 320 | 8 | 28 | 44 | | | | | | 1093 |
| GAG | KTLRAEQA | 326 | 8 | 54 | 84 | | | | | | 1094 |
| GAG | TLRAEQAT | 327 | 8 | 35 | 55 | | | | | | 1095 |
| GAG | SQEVKNWM | 334 | 8 | 11 | 17 | | | | | | 1096 |
| GAG | TQDVKNWM | 334 | 8 | 15 | 23 | | | | | | 1097 |
| GAG | TQEVKNWM | 334 | 8 | 18 | 28 | | | | | | 1098 |
| GAG | WMTDTLLV | 340 | 8 | 22 | 34 | | | | | | 1099 |
| GAG | WMTETLLV | 340 | 8 | 37 | 58 | | | | | | 1100 |
| GAG | DTLLVQNA | 343 | 8 | 22 | 34 | | | | | | 1101 |
| GAG | ETLLVQNA | 343 | 8 | 37 | 58 | | | | | | 1102 |
| GAG | NANPDCKT | 349 | 8 | 45 | 70 | | | | | | 1103 |
| GAG | ILKALGPA | 357 | 8 | 16 | 25 | | | | | | 1104 |
| GAG | KALGPAAT | 359 | 8 | 16 | 25 | | | | | | 1105 |
| GAG | ALGPAATL | 360 | 8 | 16 | 25 | | | | | | 1106 |
| GAG | ALGPGATL | 360 | 8 | 18 | 28 | | | | | | 1107 |
| GAG | PAATLEEM | 363 | 8 | 16 | 25 | | | | | | 1108 |
| GAG | AATLEEMM | 364 | 8 | 16 | 25 | | | | | | 1109 |
| GAG | GASLEEMM | 364 | 8 | 10 | 16 | | | | | | 1110 |
| GAG | GATLEEMM | 364 | 8 | 29 | 45 | | | | | | 1111 |
| GAG | ATLEEMMT | 365 | 8 | 46 | 72 | | | | | | 1112 |
| GAG | SLEEMMTA | 366 | 8 | 11 | 17 | | | | | | 1113 |
| GAG | TLEEMMTA | 366 | 8 | 46 | 72 | | | | | | 1114 |
| GAG | MMTACQGV | 370 | 8 | 60 | 94 | | | | | | 1115 |
| GAG | KARVLAEA | 383 | 8 | 57 | 89 | | | | | | 1116 |
| GAG | LAEAMSQA | 387 | 8 | 17 | 27 | | | | | | 1117 |
| GAG | LAEAMSQV | 387 | 8 | 36 | 57 | | | | | | 1118 |
| GAG | SQVTNSAT | 394 | 8 | 10 | 16 | | | | | | 1119 |
| GAG | IIIAKNCRA | 433 | 8 | 18 | 28 | | | | | | 1120 |
| GAG | HIARNCRA | 433 | 8 | 13 | 20 | | | | | | 1121 |
| GAG | HLARNCRA | 433 | 8 | 21 | 33 | | | | | | 1122 |
| GAG | QANFLGKI | 466 | 8 | 57 | 89 | | | | | | 1123 |
| GAG | GTRPGNYV | 480 | 8 | 02 | 100 | | | | | | 1124 |
| GAG | LQNRPEPT | 487 | 8 | 10 | 16 | | | | | | 1125 |
| GAG | LQSRPEPT | 487 | 8 | 28 | 44 | | | | | | 1126 |
| GAG | ELYPLASL | 543 | 8 | 14 | 22 | | | | | | 1127 |
| GAG | ELYPLTSL | 543 | 8 | 11 | 17 | | | | | | 1128 |
| GAG | PLASLKSL | 548 | 8 | 15 | 23 | | | | | | 1129 |
| GAG | PLTSLKSL | 548 | 8 | 12 | 19 | | | | | | 1130 |
| GAG | PLTSLRSL | 548 | 8 | 12 | 19 | | | | | | 1131 |
| GAG | SLFGNDPL | 554 | 8 | 12 | 19 | | | | | | 1132 |
| GAG | SLFGSDPL | 554 | 8 | 11 | 17 | | | | | | 1133 |
| GAG | VLSGGKLDA | 7 | 9 | 15 | 23 | | | | | | 1134 |
| GAG | IIIVWASREL | 34 | 9 | 21 | 33 | | | | | | 1135 |
| GAG | IILVWASREL | 34 | 9 | 36 | 56 | | | | | | 1136 |
| GAG | ALNPGLLET | 47 | 9 | 19 | 30 | | | | | | 1137 |
| GAG | AVNPGLLET | 47 | 9 | 14 | 22 | | | | | | 1138 |
| GAG | ETSEGCRQI | 54 | 9 | 16 | 25 | | | | | | 1139 |
| GAG | ILGQLQPSL | 62 | 9 | 11 | 17 | | | | | | 1140 |
| GAG | GQLQPSLQT | 64 | 9 | 11 | 17 | | | | | | 1141 |
| GAG | LQPALQTGT | 66 | 9 | 14 | 22 | | | | | | 1142 |
| GAG | SLQTGSEEL | 69 | 9 | 14 | 22 | | | | | | 1143 |
| GAG | ELRSLYNTV | 76 | 9 | 15 | 23 | | | | | | 1144 |
| GAG | SLFNTVATL | 79 | 9 | 16 | 25 | 0.0037 | | | | | 1145 |
| GAG | SLYNTVATL | 79 | 9 | 22 | 34 | 0.0053 | 0.0012 | 0.2000 | 0.0001 | 0.0004 | 1146 |
| GAG | NTVATLYCV | 82 | 9 | 41 | 64 | | | | | | 1147 |
| GAG | TLYCVIIQKI | 86 | 9 | 12 | 19 | | | | | | 1148 |
| GAG | TLYCVIIQRI | 86 | 9 | 15 | 23 | | | | | | 1149 |
| GAG | IIQRIEVKDT | 91 | 9 | 10 | 16 | | | | | | 1150 |
| GAG | DVKDTKEAL | 95 | 9 | 11 | 17 | | | | | | 1151 |
| GAG | EVKDTKEAL | 95 | 9 | 20 | 31 | | | | | | 1152 |
| GAG | DTKEALDKI | 98 | 9 | 32 | 50 | | | | | | 1153 |
| GAG | DTKEALEKI | 98 | 9 | 10 | 16 | | | | | | 1154 |
| GAG | EQNKSKKKA | 109 | 9 | 17 | 27 | | | | | | 1155 |
| GAG | KAQQAAADT | 118 | 9 | 10 | 16 | | | | | | 1156 |
| GAG | SQVSQNYPI | 146 | 9 | 22 | 44 | | | | | | 1157 |
| GAG | KVSQNYPIV | 148 | 9 | 15 | 27 | | | | | | 1158 |
| GAG | QVSQNYPIV | 148 | 9 | 27 | 48 | 0.0001 | | | | | 1159 |
| GAG | IVQNAQGQM | 155 | 9 | 21 | 33 | | | | | | 1160 |
| GAG | IVQNLQGQM | 155 | 9 | 29 | 45 | | | | | | 1161 |
| GAG | VQNAQGQMV | 156 | 9 | 14 | 22 | | | | | | 1162 |
| GAG | VQNLQGQMV | 156 | 9 | 29 | 45 | | | | | | 1163 |
| GAG | AQGQMVIIQA | 159 | 9 | 12 | 19 | | | | | | 1164 |
| GAG | LQGQMVIIQA | 159 | 9 | 21 | 33 | | | | | | 1165 |
| GAG | IIQAISPRTL | 165 | 9 | 29 | 45 | | | | | | 1166 |
| GAG | IIQALSPRTL | 165 | 9 | 11 | 17 | | | | | | 1167 |
| GAG | AISPRTLNA | 167 | 9 | 29 | 45 | | | | | | 1168 |
| GAG | ALSPRTLNA | 167 | 9 | 10 | 16 | | | | | | 1169 |
| GAG | RTLNAWVKV | 171 | 9 | 61 | 95 | 0.0012 | | | | | 1170 |
| GAG | TLNAWVKVI | 172 | 9 | 30 | 47 | 0.0032 | | | | | 1171 |
| GAG | TLNAWVKVV | 172 | 9 | 31 | 48 | 0.0005 | | | | | 1172 |
| GAG | WVKVIEEKA | 176 | 9 | 25 | 39 | | | | | | 1173 |
| GAG | WVKVVEEKA | 176 | 9 | 28 | 44 | | | | | | 1174 |
| GAG | EVIPMFSAL | 188 | 9 | 46 | 72 | 0.0001 | | | | | 1175 |
| GAG | EVIPMFTAL | 188 | 9 | 14 | 22 | | | | | | 1176 |
| GAG | FTALSEGAT | 193 | 9 | 15 | 23 | | | | | | 1177 |
| GAG | GATPQDLNM | 199 | 9 | 12 | 19 | | | | | | 1178 |
| GAG | GATPQDLNT | 199 | 9 | 42 | 66 | | | | | | 1179 |
| GAG | ATPQDLNMM | 200 | 9 | 12 | 19 | | | | | | 1180 |
| GAG | ATPQDLNTM | 200 | 9 | 42 | 66 | | | | | | 1181 |
| GAG | DLNMMLNIV | 204 | 9 | 12 | 19 | | | | | | 1182 |
| GAG | DLNTMLNTV | 204 | 9 | 42 | 66 | 0.0001 | | | | | 1183 |
| GAG | NIVGGHQAA | 210 | 9 | 12 | 19 | | | | | | 1184 |
| GAG | NTVGGIIQAA | 210 | 9 | 47 | 73 | | | | | | 1185 |
| GAG | IVGGHQAAM | 211 | 9 | 12 | 19 | | | | | | 1186 |
| GAG | TVGGIIQAAM | 211 | 9 | 47 | 73 | | | | | | 1187 |
| GAG | AAMQMLKDT | 217 | 9 | 33 | 52 | | | | | | 1188 |
| GAG | AAMQMLKET | 217 | 9 | 26 | 41 | | | | | | 1189 |
| GAG | AMQMLKDTI | 218 | 9 | 33 | 52 | | | | | | 1190 |
| GAG | AMQMLKETI | 218 | 9 | 26 | 41 | | | | | | 1191 |
| GAG | DIAGTTSTL | 256 | 9 | 48 | 75 | 0.0001 | | | | | 1192 |
| GAG | TTSTLQEQI | 260 | 9 | 45 | 71 | | | | | | 1193 |
| GAG | TLQEQIAWM | 263 | 9 | 12 | 19 | | | | | | 1194 |
| GAG | TLQEQIGWM | 263 | 9 | 27 | 42 | | | | | | 1195 |
| GAG | LQEQIAWMT | 264 | 9 | 14 | 22 | | | | | | 1196 |
| GAG | LQEQIGWMT | 264 | 9 | 29 | 45 | | | | | | 1197 |
| GAG | MTNNPPIPV | 271 | 9 | 20 | 31 | 0.0300 | 0.0006 | 0.3000 | 0.0023 | 3.3000 | 1198 |
| GAG | MTSNPPIPV | 271 | 9 | 16 | 25 | | | | | | 1199 |
| GAG | DIYKRWIIL | 284 | 9 | 17 | 27 | | | | | | 1200 |
| GAG | EIYKRWIIL | 284 | 9 | 37 | 58 | 0.0001 | | | | | 1201 |
| GAG | WIILGLNKI | 289 | 9 | 57 | 89 | 0.0091 | | | | | 1202 |
| GAG | IILGLNKIV | 290 | 9 | 57 | 89 | 0.0003 | | | | | 1203 |
| GAG | KIVRMYSPT | 296 | 9 | 15 | 23 | | | | | | 1204 |
| GAG | KIVRMYSPV | 296 | 9 | 41 | 64 | | | | | | 1205 |
| GAG | RMYSPTSIL | 299 | 9 | 14 | 22 | 0.0007 | | | | | 1206 |
| GAG | RMYSPVSIL | 299 | 9 | 40 | 63 | | | | | | 1207 |
| GAG | YVDRFFKTL | 320 | 9 | 27 | 42 | | | | | | 1208 |
| GAG | YVDRFYKTL | 320 | 9 | 28 | 44 | 0.0010 | | | | | 1209 |
| GAG | KTLRAEQAT | 326 | 9 | 34 | 53 | | | | | | 1210 |
| GAG | RAEQASQEV | 329 | 9 | 12 | 19 | | | | | | 1211 |
| GAG | RAEQATQDV | 329 | 9 | 15 | 23 | | | | | | 1212 |
| GAG | RAEQATQEV | 329 | 9 | 27 | 42 | | | | | | 1213 |
| GAG | ATQDVKNWM | 333 | 9 | 15 | 23 | | | | | | 1214 |
| GAG | ATQEVKNWM | 333 | 9 | 18 | 28 | | | | | | 1215 |
| GAG | SQEVKNWMT | 334 | 9 | 11 | 17 | | | | | | 1216 |
| GAG | TQDVKNWMT | 334 | 9 | 15 | 23 | | | | | | 1217 |
| GAG | TQEVKNWMT | 334 | 9 | 18 | 28 | | | | | | 1218 |
| GAG | DVKNWMTDT | 336 | 9 | 12 | 19 | | | | | | 1219 |
| GAG | DVKNWMTET | 336 | 9 | 12 | 19 | | | | | | 1220 |
| GAG | EVKNWMTET | 336 | 9 | 25 | 39 | | | | | | 1221 |
| GAG | NANPDCKSI | 349 | 9 | 11 | 17 | | | | | | 1222 |
| GAG | NANPDCKTI | 349 | 9 | 45 | 70 | | | | | | 1223 |
| GAG | TILKALGPA | 356 | 9 | 16 | 25 | | | | | | 1224 |
| GAG | ILKALGPAA | 357 | 9 | 16 | 25 | 0.0001 | | | | | 1225 |
| GAG | ILRALGPGA | 357 | 9 | 18 | 28 | | | | | | 1226 |
| GAG | KALGPAATL | 359 | 9 | 16 | 25 | 0.0001 | | | | | 1227 |
| GAG | PAATLEEMM | 363 | 9 | 16 | 25 | | | | | | 1228 |
| GAG | AATLEEMMT | 364 | 9 | 16 | 25 | | | | | | 1229 |
| GAG | GASLEEMMT | 364 | 9 | 10 | 16 | | | | | | 1230 |
| GAG | GATLEEMMT | 364 | 9 | 28 | 44 | | | | | | 1231 |
| GAG | ATLEEMMTA | 365 | 9 | 46 | 72 | | | | | | 1232 |
| GAG | EMMTACQGV | 369 | 9 | 59 | 92 | 0.0006 | | | | | 1233 |
| GAG | GVGGPGIIKA | 376 | 9 | 37 | 58 | | | | | | 1234 |
| GAG | GVGGPSHKA | 376 | 9 | 23 | 36 | | | | | | 1235 |
| GAG | KARVLAEAM | 383 | 9 | 57 | 89 | | | | | | 1236 |
| GAG | VLAEAMSQA | 386 | 9 | 16 | 25 | | | | | | 1237 |
| GAG | VLAEAMSQV | 386 | 9 | 33 | 52 | 0.1100 | | | | | 1238 |
| GAG | LAEAMSQVT | 387 | 9 | 23 | 37 | | | | | | 1239 |
| GAG | AMSQVTNSA | 390 | 9 | 11 | 17 | | | | | | 1240 |
| GAG | CTERQANFL | 459 | 9 | 55 | 87 | | | | | | 1241 |
| GAG | RQANFLGKI | 465 | 9 | 56 | 88 | | | | | | 1242 |
| GAG | FLQNRPEPT | 486 | 9 | 10 | 16 | | | | | | 1243 |
| GAG | FLQSRPEPT | 486 | 9 | 28 | 44 | 0.0110 | 0.0004 | 0.3100 | 0.0002 | 0.0130 | 1244 |
| GAG | LQNRPEPTA | 487 | 9 | 10 | 16 | | | | | | 1245 |
| GAG | LQSRPEPTA | 487 | 9 | 28 | 44 | | | | | | 1246 |
| GAG | PAEPIAPPA | 492 | 9 | 01 | 50 | | | | | | 1247 |
| GAG | KQEPIDKEL | 531 | 9 | 12 | 19 | | | | | | 1248 |
| GAG | PIDKELYPL | 534 | 9 | 12 | 19 | | | | | | 1249 |
| GAG | KQEPIDKEL | 535 | 9 | 01 | 25 | | | | | | 1250 |
| GAG | KQETIDKDL | 535 | 9 | 01 | 25 | | | | | | 1251 |
| GAG | PIDKELYPL | 538 | 9 | 01 | 25 | | | | | | 1252 |
| GAG | TIDKDLYPL | 538 | 9 | 01 | 25 | | | | | | 1253 |
| GAG | RASVLSGGEL | 4 | 10 | 11 | 17 | | | | | | 1254 |
| GAG | RASVLSGGKL | 4 | 10 | 28 | 44 | | | | | | 1255 |
| GAG | SVLSGGKLDA | 6 | 10 | 15 | 23 | | | | | | 1256 |
| GAG | KLDAWEKIRL | 12 | 10 | 16 | 25 | | | | | | 1257 |
| GAG | KLDKWEKIRL | 12 | 10 | 10 | 16 | | | | | | 1258 |
| GAG | WASRELERFA | 37 | 10 | 44 | 69 | | | | | | 1259 |
| GAG | FALNPGLLET | 46 | 10 | 18 | 28 | | | | | | 1260 |
| GAG | FAVNPGLLET | 46 | 10 | 14 | 22 | | | | | | 1261 |
| GAG | ETSEGCRQIL | 54 | 10 | 14 | 22 | | | | | | 1262 |
| GAG | QILGQLQPSL | 61 | 10 | 11 | 17 | | | | | | 1263 |
| GAG | QLQPALQIGT | 65 | 10 | 14 | 22 | | | | | | 1264 |
| GAG | QTGSEELRSL | 71 | 10 | 12 | 19 | | | | | | 1265 |
| GAG | ELRSLYNTVA | 76 | 10 | 15 | 23 | | | | | | 1266 |
| GAG | ATLYCVIIQKI | 85 | 10 | 12 | 19 | | | | | | 1267 |
| GAG | ATLYCVIIQRI | 85 | 10 | 15 | 23 | | | | | | 1268 |
| GAG | RIEVKDTKEA | 93 | 10 | 13 | 20 | | | | | | 1269 |
| GAG | GAAAATDSNI | 123 | 10 | 01 | 50 | | | | | | 1270 |
| GAG | AAGTGNSSQV | 130 | 10 | 01 | 50 | | | | | | 1271 |
| GAG | SQVSQNYPIV | 146 | 10 | 22 | 44 | | | | | | 1272 |
| GAG | SQNYPIVQNA | 150 | 10 | 22 | 34 | | | | | | 1273 |
| GAG | SQNYPIVQNL | 150 | 10 | 30 | 47 | | | | | | 1274 |
| GAG | PIVQNAQGQM | 154 | 10 | 21 | 33 | | | | | | 1275 |
| GAG | PIVQNLQGQM | 154 | 10 | 29 | 45 | | | | | | 1276 |
| GAG | IVQNAQGQMV | 155 | 10 | 14 | 22 | | | | | | 1277 |
| GAG | IVQNLQGQMV | 155 | 10 | 29 | 45 | | | | | | 1278 |
| GAG | NAQGQMVIIQA | 158 | 10 | 12 | 19 | | | | | | 1279 |
| GAG | NLQGQMVIIQA | 158 | 10 | 21 | 33 | | | | | | 1280 |
| GAG | LQGQMVIIQAI | 159 | 10 | 15 | 23 | | | | | | 1281 |
| GAG | MVIIQAISPRT | 163 | 10 | 27 | 42 | | | | | | 1282 |
| GAG | QAISPRTLNA | 166 | 10 | 29 | 45 | | | | | | 1283 |
| GAG | QALSPRTLNA | 166 | 10 | 10 | 16 | | | | | | 1284 |
| GAG | RTLNAWVKVI | 171 | 10 | 31 | 47 | | | | | | 1285 |
| GAG | RTLNAWVKVV | 171 | 10 | 31 | 48 | 0.0003 | | | | | 1286 |
| GAG | KAFSPEVIPM | 183 | 10 | 50 | 78 | | | | | | 1287 |
| GAG | PMFSALSEGA | 191 | 10 | 45 | 70 | | | | | | 1288 |
| GAG | PMFTALSEGA | 191 | 10 | 15 | 23 | | | | | | 1289 |
| GAG | GATPQDLNMM | 199 | 10 | 12 | 19 | | | | | | 1290 |
| GAG | GATPQDLNTM | 199 | 10 | 42 | 66 | | | | | | 1291 |
| GAG | ATPQDLNMML | 200 | 10 | 12 | 19 | | | | | | 1292 |
| GAG | ATPQDLNTML | 200 | 10 | 42 | 66 | | | | | | 1293 |
| GAG | PQDLNMMLNI | 202 | 10 | 11 | 17 | | | | | | 1294 |
| GAG | PQDLNTMLNT | 202 | 10 | 43 | 67 | | | | | | 1295 |
| GAG | MLNIVGGIIQA | 208 | 10 | 12 | 19 | | | | | | 1296 |
| GAG | MLNTVGGIIQA | 208 | 10 | 47 | 73 | 0.0022 | | | | | 1297 |
| GAG | NIVGGHQAAM | 210 | 10 | 12 | 19 | | | | | | 1298 |
| GAG | NTVGGIIQAAM | 210 | 10 | 47 | 73 | | | | | | 1299 |
| GAG | QAAMQMLKDT | 216 | 10 | 33 | 52 | | | | | | 1300 |
| GAG | QAAMQMLKET | 216 | 10 | 26 | 41 | | | | | | 1301 |
| GAG | AAMQMLKDTI | 217 | 10 | 33 | 52 | | | | | | 1302 |
| GAG | AAMQMLKETI | 217 | 10 | 26 | 41 | | | | | | 1303 |
| GAG | MLKDTINEEA | 221 | 10 | 32 | 50 | | | | | | 1304 |
| GAG | MLKETINEEA | 221 | 10 | 22 | 34 | | | | | | 1305 |
| GAG | AAEWDKLIIPV | 230 | 10 | 34 | 53 | | | | | | 1306 |
| GAG | AAEWDRVIIPV | 230 | 10 | 14 | 22 | | | | | | 1307 |
| GAG | RLHPVHAGPI | 235 | 10 | 22 | 34 | | | | | | 1308 |
| GAG | RVIIPVHAGPI | 235 | 10 | 14 | 22 | | | | | | 1309 |
| GAG | HAGPIAPGQM | 240 | 10 | 18 | 28 | | | | | | 1310 |
| GAG | HAGPIPPGQM | 240 | 10 | 17 | 27 | | | | | | 1311 |
| GAG | QMREPRGSDI | 248 | 10 | 44 | 69 | | | | | | 1312 |
| GAG | GTTSTLQEQI | 259 | 10 | 45 | 70 | | | | | | 1313 |
| GAG | TTSTLQEQIA | 260 | 10 | 11 | 17 | | | | | | 1314 |
| GAG | STLQEQIAWM | 262 | 10 | 12 | 19 | | | | | | 1315 |
| GAG | STLQEQIGWM | 262 | 10 | 27 | 42 | | | | | | 1316 |
| GAG | TLQEQIAWMT | 263 | 10 | 12 | 19 | | | | | | 1317 |
| GAG | TLQEQIGWMT | 263 | 10 | 27 | 42 | | | | | | 1318 |
| GAG | WMTNNPPIPV | 270 | 10 | 20 | 31 | 0.0510 | 0.0014 | 0.5900 | 0.0002 | 0.0180 | 1319 |
| GAG | WMTSNPPIPV | 270 | 10 | 16 | 25 | | | | | | 1320 |
| GAG | GANSIPVGDI | 276 | 10 | 01 | 50 | | | | | | 1321 |
| GAG | PVGDIYKRWI | 281 | 10 | 17 | 27 | | | | | | 1322 |
| GAG | PVGEIYKRWI | 281 | 10 | 40 | 63 | | | | | | 1323 |
| GAG | WIILGLNKIV | 289 | 10 | 57 | 89 | 0.0009 | | | | | 1324 |
| GAG | ILGLNKIVRM | 291 | 10 | 57 | 89 | 0.0010 | | | | | 1325 |
| GAG | IVRMYSPTSI | 297 | 10 | 14 | 22 | | | | | | 1326 |
| GAG | IVRMYSPVSI | 297 | 10 | 40 | 63 | | | | | | 1327 |
| GAG | QASQEVKNWM | 332 | 10 | 11 | 17 | | | | | | 1328 |
| GAG | QATQDVKNWM | 332 | 10 | 15 | 23 | | | | | | 1329 |
| GAG | QATQEVKNWM | 332 | 10 | 18 | 28 | | | | | | 1330 |
| GAG | ATQDVKNWMT | 333 | 10 | 15 | 23 | | | | | | 1331 |
| GAG | ATQEVKNWMT | 333 | 10 | 18 | 28 | | | | | | 1332 |
| GAG | DVKNWMTDTL | 336 | 10 | 12 | 19 | | | | | | 1333 |
| GAG | DVKNWMTETL | 336 | 10 | 11 | 17 | | | | | | 1334 |
| GAG | EVKNWMTETL | 336 | 10 | 25 | 39 | | | | | | 1335 |
| GAG | MTDTLLVQNA | 341 | 10 | 22 | 34 | | | | | | 1336 |
| GAG | MTETLLVQNA | 341 | 10 | 36 | 56 | | | | | | 1337 |
| GAG | VQNANPDCKT | 347 | 10 | 45 | 70 | | | | | | 1338 |
| GAG | NANPDCKSIL | 349 | 10 | 11 | 17 | | | | | | 1339 |
| GAG | NANPDCKTIL | 349 | 10 | 45 | 70 | | | | | | 1340 |
| GAG | KTILKALGPA | 355 | 10 | 16 | 25 | | | | | | 1341 |
| GAG | TILKALGPAA | 356 | 10 | 16 | 25 | | | | | | 1342 |
| GAG | TILRALGPGA | 356 | 10 | 13 | 20 | | | | | | 1343 |
| GAG | ILKALGPAAT | 357 | 10 | 16 | 25 | | | | | | 1344 |
| GAG | PAATLEEMMT | 363 | 10 | 16 | 25 | | | | | | 1345 |
| GAG | AATLEEMMTA | 364 | 10 | 16 | 25 | | | | | | 1346 |
| GAG | GASLEEMMTA | 364 | 10 | 10 | 16 | | | | | | 1347 |
| GAG | GATLEIEMMTA | 364 | 10 | 28 | 44 | | | | | | 1348 |
| GAG | RVLAEAMSQA | 385 | 10 | 16 | 25 | | | | | | 1349 |
| GAG | RVLAEAMSQV | 385 | 10 | 33 | 52 | 0.0058 | | | | | 1350 |
| GAG | VLAEAMSQVT | 386 | 10 | 20 | 31 | | | | | | 1351 |
| GAG | EAMSQVTNSA | 389 | 10 | 11 | 17 | | | | | | 1352 |
| GAG | AMSQVTNSAT | 390 | 10 | 10 | 16 | | | | | | 1353 |
| GAG | QMKDCIERQA | 455 | 10 | 49 | 77 | | | | | | 1354 |
| GAG | FLQNRPEPTA | 486 | 10 | 10 | 16 | | | | | | 1355 |
| GAG | FLQSRPEPTA | 486 | 10 | 28 | 44 | 0.0013 | | | | | 1356 |
| GAG | PAESFRFEET | 511 | 10 | 02 | 67 | | | | | | 1357 |
| GAG | TTPSQKQEPI | 522 | 10 | 09 | 45 | | | | | | 1358 |
| GAG | ETIDKDLYPL | 537 | 10 | 01 | 25 | | | | | | 1359 |
| GAG | PIDKELYPLT | 538 | 10 | 01 | 25 | | | | | | 1360 |
| GAG | RTENSLYPPL | 538 | 10 | 01 | 25 | | | | | | 1361 |
| GAG | TIDKDLYPLA | 538 | 10 | 01 | 25 | | | | | | 1362 |
| GAG | WASRELERFAL | 37 | 11 | 22 | 34 | | | | | | 1363 |
| GAG | WASRELERFAV | 37 | 11 | 17 | 27 | | | | | | 1364 |
| GAG | ELERFALNPGL | 42 | 11 | 14 | 22 | | | | | | 1365 |
| GAG | ELERFAVNPGL | 42 | 11 | 15 | 23 | | | | | | 1366 |
| GAG | LLETSEGCRQI | 52 | 11 | 16 | 25 | | | | | | 1367 |
| GAG | RQILGQLQPSL | 60 | 11 | 11 | 17 | | | | | | 1368 |
| GAG | LQTGSEELRSL | 70 | 11 | 11 | 17 | | | | | | 1369 |
| GAG | ELRSLYNTVAT | 76 | 11 | 13 | 20 | | | | | | 1370 |
| GAG | VATLYCVHQKI | 84 | 11 | 12 | 19 | | | | | | 1371 |
| GAG | VATLYCVHQRI | 84 | 11 | 15 | 23 | | | | | | 1372 |
| GAG | RIEVKDTKEAL | 93 | 11 | 12 | 19 | | | | | | 1373 |
| GAG | PIVQNAQGQMV | 154 | 11 | 14 | 22 | | | | | | 1374 |
| GAG | PIVQNLQGQMV | 154 | 11 | 29 | 45 | | | | | | 1375 |
| GAG | NLQGQMVIIQAI | 158 | 11 | 15 | 23 | | | | | | 1376 |
| GAG | QMVHQAISPRT | 162 | 11 | 27 | 42 | | | | | | 1377 |
| GAG | MVHQAISPRTL | 163 | 11 | 27 | 42 | | | | | | 1378 |
| GAG | IIQAISPRTLNA | 165 | 11 | 29 | 45 | | | | | | 1379 |
| GAG | IIQALSPR1LNA | 165 | 11 | 10 | 16 | | | | | | 1380 |
| GAG | AISPRTLNAWV | 167 | 11 | 29 | 45 | | | | | | 1381 |
| GAG | ALSPRTLNAWV | 167 | 11 | 10 | 16 | | | | | | 1382 |
| GAG | NAWVKVIEEKA | 174 | 11 | 25 | 39 | | | | | | 1383 |
| GAG | NAWVKVVEEKA | 174 | 11 | 27 | 42 | | | | | | 1384 |
| GAG | VIEEKAFSPEV | 179 | 11 | 20 | 31 | | | | | | 1385 |
| GAG | VVEEKAFSPEV | 179 | 11 | 28 | 44 | | | | | | 1386 |
| GAG | PMFSALSEGAT | 191 | 11 | 44 | 69 | | | | | | 1387 |
| GAG | PMFTALSEGAT | 191 | 11 | 15 | 23 | | | | | | 1388 |
| GAG | ALSEGATPQDL | 195 | 11 | 58 | 91 | | | | | | 1389 |
| GAG | GATPQDLNMML | 199 | 11 | 12 | 19 | | | | | | 1390 |
| GAG | GATPQDLNIML | 199 | 11 | 42 | 66 | | | | | | 1391 |
| GAG | PQDLNNIMLNIV | 202 | 11 | 11 | 17 | | | | | | 1392 |
| GAG | PQDLNTMLNTV | 202 | 11 | 41 | 64 | | | | | | 1393 |
| GAG | MMLNIVGGIIQA | 207 | 11 | 12 | 19 | | | | | | 1394 |
| GAG | TMLNTVGGIIQA | 207 | 11 | 43 | 67 | | | | | | 1395 |
| GAG | MLNIVGGIIQAA | 208 | 11 | 12 | 19 | | | | | | 1396 |
| GAG | MLNTVGGIIQAA | 208 | 11 | 47 | 73 | | | | | | 1397 |
| GAG | IVGGIIQAAMQM | 211 | 11 | 11 | 17 | | | | | | 1398 |
| GAG | TVGGIIQAAMQM | 211 | 11 | 47 | 73 | | | | | | 1399 |
| GAG | HQAAMQMLKDT | 215 | 11 | 33 | 52 | | | | | | 1400 |
| GAG | HQAAMQMLKET | 215 | 11 | 26 | 41 | | | | | | 1401 |
| GAG | QAAMQMLKDTI | 216 | 11 | 33 | 52 | | | | | | 1402 |
| GAG | QAAMQMLKETI | 216 | 11 | 26 | 41 | | | | | | 1403 |
| GAG | QMLKDTINEEA | 220 | 11 | 32 | 50 | | | | | | 1404 |
| GAG | QMLKETINEEA | 220 | 11 | 22 | 34 | | | | | | 1405 |
| GAG | MLKDTINEEAA | 221 | 11 | 32 | 50 | | | | | | 1406 |
| GAG | MLKETINEEAA | 221 | 11 | 22 | 34 | | | | | | 1407 |
| GAG | EAAEWDRLIIPV | 229 | 11 | 34 | 53 | | | | | | 1408 |
| GAG | EAAEWDRVHPV | 229 | 11 | 14 | 22 | | | | | | 1409 |
| GAG | RLIIPVIIAGPIA | 235 | 11 | 15 | 23 | | | | | | 1410 |
| GAG | GQMREPRGSDI | 247 | 11 | 44 | 69 | | | | | | 1411 |
| GAG | QMREPRGSDIA | 248 | 11 | 44 | 69 | | | | | | 1412 |
| GAG | GTTSTLQEQIA | 259 | 11 | 11 | 17 | | | | | | 1413 |
| GAG | STLQEQIAWMT | 262 | 11 | 12 | 19 | | | | | | 1414 |
| GAG | STLQEQIGWMT | 262 | 11 | 27 | 42 | | | | | | 1415 |
| GAG | QIGWMTNNPPI | 267 | 11 | 18 | 29 | | | | | | 1416 |
| GAG | QIGWMFSNPPI | 267 | 11 | 10 | 16 | | | | | | 1417 |
| GAG | PVGDIYKRWII | 281 | 11 | 17 | 27 | | | | | | 1418 |
| GAG | PVGEIYKRWII | 281 | 11 | 39 | 61 | | | | | | 1419 |
| GAG | DIYKRWIILGL | 284 | 11 | 17 | 27 | | | | | | 1420 |
| GAG | EIYKRWIILGL | 284 | 11 | 37 | 58 | | | | | | 1421 |
| GAG | IILGLNKIVRM | 290 | 11 | 56 | 88 | | | | | | 1422 |
| GAG | KIVRMYSPTSI | 296 | 11 | 14 | 22 | | | | | | 1423 |
| GAG | KIVRMYSPVSI | 296 | 11 | 39 | 61 | | | | | | 1424 |
| GAG | IVRMYSPTSIL | 297 | 11 | 14 | 22 | | | | | | 1425 |
| GAG | IVRMYSPVSIL | 297 | 11 | 40 | 63 | | | | | | 1426 |
| GAG | RMYSPTSILDI | 299 | 11 | 13 | 20 | | | | | | 1427 |
| GAG | RMYSPVSILDI | 299 | 11 | 38 | 59 | | | | | | 1428 |
| GAG | YVDRFFKTLRA | 320 | 11 | 27 | 42 | | | | | | 1429 |
| GAG | YVDRFYKTLRA | 320 | 11 | 28 | 44 | | | | | | 1430 |
| GAG | TLRAEQASQEV | 327 | 11 | 12 | 19 | | | | | | 1431 |
| GAG | TLRAEQATQDV | 327 | 11 | 11 | 7 | | | | | | 1432 |
| GAG | TLRAEQATQEV | 327 | 11 | 24 | 38 | | | | | | 1433 |
| GAG | EQASQEVKNWM | 331 | 11 | 11 | 17 | | | | | | 1434 |
| GAG | EQATQDVKNWM | 331 | 11 | 15 | 23 | | | | | | 1435 |
| GAG | EQATQEVKNWM | 331 | 11 | 18 | 28 | | | | | | 1436 |
| GAG | QASQEVKNWMT | 332 | 11 | 11 | 17 | | | | | | 1437 |
| GAG | QATQDVKNWMT | 332 | 11 | 15 | 23 | | | | | | 1438 |
| GAG | QATQEVKNWMT | 332 | 11 | 18 | 28 | | | | | | 1439 |
| GAG | SQEVKNWMTET | 334 | 11 | 11 | 17 | | | | | | 1440 |
| GAG | TQDVKNWMTDT | 334 | 11 | 11 | 17 | | | | | | 1441 |
| GAG | TQEVKNWMTET | 334 | 11 | 14 | 22 | | | | | | 1442 |
| GAG | DVKNWMTDTLL | 336 | 11 | 12 | 19 | | | | | | 1443 |
| GAG | DVKNWMTETLL | 336 | 11 | 11 | 17 | | | | | | 1444 |
| GAG | EVKNWMTETLL | 336 | 11 | 25 | 39 | | | | | | 1445 |
| GAG | WMTDTLLVQNA | 340 | 11 | 22 | 34 | | | | | | 1446 |
| GAG | WMTETLLVQNA | 340 | 11 | 35 | 55 | | | | | | 1447 |
| GAG | LVQNANPDCKT | 346 | 11 | 45 | 70 | | | | | | 1448 |
| GAG | VQNANPDCKSI | 347 | 11 | 10 | 16 | | | | | | 1449 |
| GAG | VQNANPDCKTI | 347 | 11 | 45 | 70 | | | | | | 1450 |
| GAG | KTILKALGPAA | 355 | 11 | 16 | 25 | | | | | | 1451 |
| GAG | KTILRALGPGA | 355 | 11 | 13 | 20 | | | | | | 1452 |
| GAG | TILKALGPAAT | 356 | 11 | 16 | 25 | | | | | | 1453 |
| GAG | ILKALGPAATL | 357 | 11 | 16 | 25 | | | | | | 1454 |
| GAG | ALGPAATLEEM | 360 | 11 | 16 | 25 | | | | | | 1455 |
| GAG | ALGPGATLEEM | 360 | 11 | 17 | 27 | | | | | | 1456 |
| GAG | PAATLEEMMTA | 363 | 11 | 16 | 25 | | | | | | 1457 |
| GAG | CQGVGGPGHKA | 374 | 11 | 36 | 56 | | | | | | 1458 |
| GAG | CQGVGGPSIIKA | 374 | 11 | 23 | 36 | | | | | | 1459 |
| GAG | GVGGPGIIKARV | 376 | 11 | 36 | 56 | | | | | | 1460 |
| GAG | GVGGIPSHKARV | 376 | 11 | 19 | 30 | | | | | | 1461 |
| GAG | RVLAEAMSQVT | 385 | 11 | 20 | 31 | | | | | | 1462 |
| GAG | EAMSQVTNSAT | 389 | 11 | 10 | 16 | | | | | | 1463 |
| GAG | SAQQDLKGGYT | 393 | 11 | 01 | 50 | | | | | | 1464 |
| GAG | TAQQDLKGGYT | 393 | 11 | 01 | 50 | | | | | | 1465 |
| GAG | HQMKDCTERQA | 454 | 11 | 49 | 77 | | | | | | 1466 |
| GAG | PAEPTAPPAEI | 492 | 11 | 01 | 50 | | | | | | 1467 |
| GAG | PAESFRFEETT | 511 | 11 | 02 | 67 | | | | | | 1468 |
| GAG | SQKQEPIDKEL | 529 | 11 | 09 | 15 | | | | | | 1469 |
| GAG | ETIDKDLYPLA | 537 | 11 | 01 | 25 | | | | | | 1470 |
| GAG | RTENSLYPPLT | 538 | 11 | 01 | 25 | | | | | | 1471 |
| GAG | SLKSLFGNDPL | 551 | 11 | 12 | 19 | | | | | | 1472 |
| NEF | RAQAEPAA | 32 | 8 | 01 | 17 | | | | | | 1473 |
| NEF | AQAEPAAA | 33 | 8 | 01 | 17 | | | | | | 1474 |
| NEF | PAADGVGA | 41 | 8 | IS | 23 | | | | | | 1475 |
| NEF | PAAEGVGA | 41 | 8 | 21 | 33 | | | | | | 1476 |
| NEF | AADGVGAV | 42 | 8 | 11 | 18 | | | | | | 1477 |
| NEF | AAEGVGAA | 42 | 8 | 10 | 16 | | | | | | 1478 |
| NEF | AAEGVGAV | 42 | 8 | 17 | 28 | | | | | | 1479 |
| NEF | DLEKIIGAI | 57 | 8 | 14 | 22 | | | | | | 1480 |
| NEF | GAITSSNT | 62 | 8 | 32 | 50 | | | | | | 1481 |
| NEF | GALISSNT | 62 | 8 | 10 | 16 | | | | | | 1482 |
| NEF | AITSSNTA | 63 | 8 | 27 | 42 | | | | | | 1483 |
| NEF | ITSSNTAA | 64 | 8 | 15 | 23 | | | | | | 1484 |
| NEF | AATNADCA | 70 | 8 | 12 | 22 | | | | | | 1485 |
| NEF | EAQEEEEV | 82 | 8 | 16 | 25 | | | | | | 1486 |
| NEF | PVRPQVPL | 95 | 8 | 48 | 75 | | | | | | 1487 |
| NEF | PQVPLRPM | 99 | 8 | 56 | 88 | | | | | | 1488 |
| NEF | QVPLRPMT | 100 | 8 | 57 | 89 | 0.0001 | | | | | 1489 |
| NEF | ALDLSHFL | 111 | 8 | 11 | 17 | | | | | | 1490 |
| NEF | AVDLSIIFL | 111 | 8 | 15 | 23 | | | | | | 1491 |
| NEF | FLKEKGGL | 117 | 8 | 56 | 88 | | | | | | 1492 |
| NEF | SQKRQDIL | 177 | 8 | 12 | 19 | | | | | | 1493 |
| NEF | QTEPAAVGV | 32 | 9 | 01 | 17 | | | | | | 1494 |
| NEF | RAEPAADGV | 32 | 9 | 01 | 17 | | | | | | 1495 |
| NEF | RAQAEPAAA | 32 | 9 | 01 | 17 | | | | | | 1496 |
| NEF | RTEPAAVGV | 32 | 9 | 01 | 17 | | | | | | 1497 |
| NEF | QAEPAAEGV | 33 | 9 | 01 | 17 | | | | | | 1498 |
| NEF | QAPTAAKGV | 33 | 9 | 01 | 17 | | | | | | 1499 |
| NEF | QAEPAAAGV | 34 | 9 | 01 | 33 | | | | | | 1500 |
| NEF | PAADGVGAV | 41 | 9 | 11 | 17 | | | | | | 1501 |
| NEF | PAAEGVGAV | 41 | 9 | 12 | 19 | | | | | | 1502 |
| NEF | GVGAASQDL | 45 | 9 | 11 | 17 | | | | | | 1503 |
| NEF | GVGAVSQDL | 45 | 9 | 21 | 33 | | | | | | 1504 |
| NEF | GVGAVSRDL | 45 | 9 | 17 | 27 | 0.0001 | | | | | 1505 |
| NEF | DLEKIIGAIT | 57 | 9 | 14 | 22 | | | | | | 1506 |
| NEF | GAITSSNTA | 62 | 9 | 27 | 42 | | | | | | 1507 |
| NEF | AITSSNTAA | 63 | 9 | 14 | 22 | | | | | | 1508 |
| NEF | ITSSNTAAT | 64 | 9 | 13 | 20 | | | | | | 1509 |
| NEF | TAATNADCA | 69 | 9 | 12 | 19 | | | | | | 1510 |
| NEF | ATNAECAWL | 71 | 9 | 12 | 22 | | | | | | 1511 |
| NEF | NADCAWLEA | 73 | 9 | 17 | 27 | | | | | | 1512 |
| NEF | PQVPLRPMT | 99 | 9 | 56 | 88 | | | | | | 1513 |
| NEF | PLRPMTYKA | 102 | 9 | 21 | 33 | | | | | | 1514 |
| NEF | MTYKGAFDL | 106 | 9 | 12 | 19 | | | | | | 1515 |
| NEF | GAFDLSFFL | 110 | 9 | 10 | 16 | | | | | | 1516 |
| NEF | RQDILDLWV | 382 | 9 | 20 | 33 | | | | | | 1517 |
| NEF | RQEILDLWV | 182 | 9 | 35 | 55 | | | | | | 1518 |
| NEF | ILDLWVYIIT | 186 | 9 | 34 | 53 | | | | | | 1519 |
| NEF | ILDLWVYNT | 186 | 9 | 19 | 30 | | | | | | 1520 |
| NEF | LTFGWCFKL | 221 | 9 | 39 | 61 | 0.1400 | 0.1300 | 0.0022 | 0.0180 | 7.2000 | 1521 |
| NEF | LVPVEIPREV | 229 | 9 | 11 | 17 | | | | | | 1522 |
| NEF | KQAEPAAEGV | 32 | 10 | 01 | 17 | | | | | | 1523 |
| NEF | RQAPTAAKGV | 32 | 10 | 01 | 17 | | | | | | 1524 |
| NEF | AQAEPAAAGV | 33 | 10 | 01 | 17 | | | | | | 1525 |
| NEF | GAITSSNTAA | 62 | 10 | 14 | 22 | | | | | | 1526 |
| NEF | AITSSNTAAT | 63 | 10 | 13 | 20 | | | | | | 1527 |
| NEF | NTAATNADCA | 68 | 10 | 12 | 19 | | | | | | 1528 |
| NEF | AATNADCAWL | 70 | 10 | 12 | 22 | | | | | | 1529 |
| NEF | WLEAQEEEEV | 79 | 10 | 15 | 24 | | | | | | 1530 |
| NEF | EVGFPVRPQV | 91 | 10 | 40 | 63 | | | | | | 1531 |
| NEF | PLRPMTYKAA | 102 | 10 | 20 | 31 | | | | | | 1532 |
| NEF | PLRPMTYKGA | 102 | 10 | 25 | 39 | | | | | | 1533 |
| NEF | PMTYKGAFDL | 105 | 10 | 12 | 19 | | | | | | 1534 |
| NEF | LIYSKKRQEI | 174 | 10 | 18 | 28 | | | | | | 1535 |
| NEF | SQKRQDILDL | 177 | 10 | 12 | 19 | | | | | | 1536 |
| NEF | DILDLWVYIIT | 185 | 10 | 12 | 19 | | | | | | 1537 |
| NEF | EILDLWVYIIT | 185 | 10 | 22 | 34 | | | | | | 1538 |
| NEF | EILDLWVYNT | 185 | 10 | 11 | 17 | | | | | | 1539 |
| NEF | WQNYTPGPGI | 204 | 10 | 18 | 29 | | | | | | 1540 |
| NEF | WQNYTPGPGT | 204 | 10 | 21 | 33 | | | | | | 1541 |
| NEF | WQNYTPGPGV | 204 | 10 | 11 | 17 | | | | | | 1542 |
| NEF | PLTFGWCFKL | 219 | 10 | 39 | 61 | 0.0350 | 0.0058 | 0.0021 | 0.0010 | 0.8400 | 1543 |
| NEF | LIFGWCFKLV | 221 | 10 | 35 | 55 | 0.0170 | 0.0880 | 0.0540 | 0.0640 | 6.5000 | 1544 |
| NEF | KLVPVDPREV | 228 | 10 | 11 | 17 | | | | | | 1545 |
| NEF | LLIIPICQIIGM | 257 | 10 | 10 | 16 | | | | | | 1546 |
| NEF | LLIIPMSQIIGM | 257 | 10 | 12 | 19 | | | | | | 1547 |
| NEF | QTEPAAVGVGA | 32 | 11 | 01 | 17 | | | | | | 1548 |
| NEF | RAEPAADGVGA | 32 | 11 | 01 | 17 | | | | | | 1549 |
| NEF | RAQAEPAAAGV | 32 | 11 | 01 | 17 | | | | | | 1550 |
| NEF | RTEPAAVGVGA | 32 | 11 | 01 | 17 | | | | | | 1551 |
| NEF | QAEPAAEGVGA | 33 | 11 | 01 | 17 | | | | | | 1552 |
| NEF | QAPTAAKGVGA | 33 | 11 | 01 | 17 | | | | | | 1553 |
| NEF | QAEPAAAGVGA | 34 | 11 | 01 | 33 | | | | | | 1554 |
| NEF | AVSRDLEKIIGA | 48 | 11 | 11 | 17 | | | | | | 1555 |
| NEF | GAITSSNTAAT | 62 | 11 | 13 | 20 | | | | | | 1556 |
| NEF | ITSSNTAATNA | 64 | 11 | 12 | 19 | | | | | | 1557 |
| NEF | TAATNADCAWL | 69 | 11 | 12 | 19 | | | | | | 1558 |
| NEF | ATNADCAWLEA | 71 | 11 | 12 | 22 | | | | | | 1559 |
| NEF | AQEEEEVGFPV | 83 | 11 | 17 | 27 | | | | | | 1560 |
| NEF | PVRPQVPLRPM | 95 | 11 | 47 | 73 | | | | | | 1561 |
| NEF | QVPLRPMTYKA | 100 | 11 | 20 | 31 | | | | | | 1562 |
| NEF | FLKEKGGLDGL | 117 | 11 | 26 | 41 | | | | | | 1563 |
| NEF | FLKEKGGLEGL | 117 | 11 | 29 | 45 | | | | | | 1564 |
| NEF | GLIYSKKRQEI | 173 | 11 | 18 | 28 | | | | | | 1565 |
| NEF | LIYSKKRQEIL | 174 | 11 | 18 | 28 | | | | | | 1566 |
| NEF | YTPGP6IRYPL | 207 | 11 | 16 | 25 | | | | | | 1567 |
| NEF | YTPGPCITRFPL | 207 | 11 | 13 | 20 | | | | | | 1568 |
| NEF | PLTFGWCFKLV | 219 | 11 | 35 | 55 | | | | | | 1569 |
| NEF | CLLHPMSQIIGM | 256 | 11 | 10 | 16 | | | | | | 1570 |
| POL | LAFPQGEA | 6 | 8 | 12 | 19 | | | | | | 1571 |
| POL | LAFPQGKA | 6 | 8 | 12 | 19 | | | | | | 1572 |
| POL | LAFQQGEA | 6 | 8 | 16 | 25 | | | | | | 1573 |
| POL | QTRANSPT | 21 | 8 | 28 | 45 | | | | | | 1574 |
| POL | PTRRSLQV | 30 | 8 | 14 | 22 | | | | | | I575 |
| POL | QTRANSPT | 35 | 8 | 01 | 33 | | | | | | 1S76 |
| POL | PTSRELQV | 36 | 8 | 01 | 33 | | | | | | 1577 |
| POL | GADRQGIV | 70 | 8 | 01 | 20 | | | | | | 1578 |
| POL | GTLNCPQI | 80 | 8 | 01 | 33 | | | | | | 1579 |
| POL | PTFNFPQI | 80 | 8 | 01 | 33 | | | | | | 1580 |
| POL | ITLWQRPL | 90 | 8 | 47 | 73 | | | | | | 1581 |
| POL | TLWQRPLV | 91 | 8 | 49 | 77 | | | | | | 1582 |
| POL | WQRPLVTI | 93 | 8 | 21 | 33 | | | | | | 1583 |
| POL | WQRPLVTV | 93 | 8 | 19 | 30 | | | | | | 1584 |
| POL | TIKIGGQL | 99 | 8 | 17 | 27 | | | | | | 1585 |
| POL | TVKIGGQL | 99 | 8 | 11 | 17 | | | | | | 1586 |
| POL | GQLIEALL | 104 | 8 | 10 | 16 | | | | | | 1587 |
| POL | GQLKEALL | 104 | 8 | 34 | 53 | | | | | | 1588 |
| POL | LIEALLDT | 106 | 8 | 10 | 16 | | | | | | 1589 |
| POL | EALLDTGA | 108 | 8 | 61 | 95 | | | | | | 1590 |
| POL | DTGADDTV | 112 | 8 | 63 | 98 | | | | | | 1591 |
| POL | TVLEDINL | 118 | 8 | 13 | 20 | | | | | | 1592 |
| POL | TVLEEINL | 118 | 8 | 15 | 23 | | | | | | 1593 |
| POL | GIGGFIKV | 136 | 8 | 64 | 100 | | | | | | 1594 |
| POL | KVRQYDQI | 142 | 8 | 41 | 64 | | | | | | 1595 |
| POL | RQYDQILI | 144 | 8 | 20 | 31 | | | | | | 1596 |
| POL | RQYDQIPI | 144 | 8 | 13 | 20 | | | | | | 1597 |
| POL | EICGHKAI | 152 | 8 | 19 | 30 | | | | | | 1598 |
| POL | EICGKKAI | 152 | 8 | 24 | 38 | | | | | | 1599 |
| POL | KAIGTVLV | 157 | 8 | 48 | 75 | | | | | | 1600 |
| POL | GTVLVGPT | 160 | 8 | 60 | 94 | | | | | | 1601 |
| POL | VLVGPTPV | 162 | 8 | 53 | 83 | | | | | | 1602 |
| POL | NIIGRNLL | 170 | 8 | 26 | 41 | | | | | | 1603 |
| POL | NIIGRNML | 170 | 8 | 31 | 48 | | | | | | 1604 |
| POL | IIGRNLLT | 171 | 8 | 26 | 41 | | | | | | 1605 |
| POL | IIGRNMLT | 171 | 8 | 30 | 47 | | | | | | 1606 |
| POL | LLTQIGCT | 176 | 8 | 21 | 33 | | | | | | 1607 |
| POL | MLTQIGCT | 176 | 8 | 18 | 28 | | | | | | 1608 |
| POL | MLTQLGCT | 176 | 8 | 10 | 16 | | | | | | 1609 |
| POL | LTQIGCTL | 177 | 8 | 42 | 66 | | | | | | 1610 |
| POL | LTQLGCTL | 177 | 8 | 15 | 23 | | | | | | 1611 |
| POL | PISPIETV | 187 | 8 | 57 | 89 | | | | | | 1612 |
| POL | PVKLKPGM | 195 | 8 | 56 | 88 | | | | | | 1613 |
| POL | KVKQWPLT | 207 | 8 | 49 | 77 | | | | | | 1614 |
| POL | LTEEKIKA | 213 | 8 | 56 | 88 | | | | | | 1615 |
| POL | KIKALTEI | 217 | 8 | 28 | 44 | | | | | | 1616 |
| POL | KIKALVEI | 217 | 8 | 15 | 23 | | | | | | 1617 |
| POL | KALTEICT | 219 | 8 | 12 | 19 | | | | | | 1618 |
| POL | KALVEICT | 219 | 8 | 15 | 24 | | | | | | 1619 |
| POL | LVEICTEM | 221 | 8 | 15 | 24 | | | | | | 1620 |
| POL | EMEKEGKI | 229 | 8 | 42 | 66 | | | | | | 1621 |
| POL | AIKKKDST | 251 | 8 | 59 | 92 | | | | | | 1622 |
| POL | STKWRKLV | 257 | 8 | 59 | 92 | | | | | | 1623 |
| POL | KLVDFREL | 262 | 8 | 63 | 98 | | | | | | 1624 |
| POL | RTQDPWEV | 272 | 8 | 55 | 86 | | | | | | 1625 |
| POL | QLGIPHPA | 280 | 8 | 56 | 89 | | | | | | 1626 |
| POL | GIPHPAGL | 282 | 8 | 56 | 89 | | | | | | 1627 |
| POL | GLKKKKSV | 288 | 8 | 52 | 81 | | | | | | 1628 |
| POL | TVLDVGDA | 296 | 8 | 58 | 91 | | | | | | 1629 |
| POL | DAYESVPL | 302 | 8 | 55 | 86 | | | | | | 1630 |
| POL | TAFYIPSI | 317 | 8 | 37 | 58 | | | | | | 1631 |
| POL | TAFIIPSI | 317 | 8 | 13 | 20 | | | | | | 1632 |
| POL | GIRYQYNV | 330 | 8 | 52 | 81 | | | | | | 1633 |
| POL | PAIFQSSM | 346 | 8 | 42 | 66 | | | | | | 1634 |
| POL | AIFQSSMT | 347 | 8 | 39 | 61 | | | | | | 1635 |
| POL | FQSSMTKI | 349 | 8 | 38 | 59 | | | | | | 1636 |
| POL | KQNPDIVI | 362 | 8 | 14 | 22 | | | | | | 1637 |
| POL | DIVIYQYM | 366 | 8 | 18 | 28 | | | | | | 1638 |
| POL | EIVIYQYM | 366 | 8 | 24 | 38 | | | | | | 1639 |
| POL | DLYVGSDL | 375 | 8 | 63 | 98 | | | | | | 1640 |
| POL | YVGSDLEI | 377 | 8 | 58 | 91 | | | | | | 1641 |
| POL | IILLKWGFT | 397 | 8 | 22 | 34 | | | | | | 1642 |
| POL | HLLRWGFT | 397 | 8 | 25 | 39 | | | | | | 1643 |
| POL | LLKWGFTT | 398 | 8 | 23 | 36 | | | | | | 1644 |
| POL | LLRWGFTT | 398 | 8 | 24 | 38 | | | | | | 1645 |
| POL | IlQKEPPFL | 410 | 8 | 62 | 97 | | | | | | 1646 |
| POL | FLWMGYEL | 416 | 8 | 64 | 100 | | | | | | 1647 |
| POL | ELIIPDKWT | 422 | 8 | 60 | 94 | | | | | | 1648 |
| POL | WTVQPIQL | 428 | 8 | 28 | 44 | | | | | | 1649 |
| POL | WTVQPIVL | 428 | 8 | 13 | 20 | | | | | | 1650 |
| POL | TVNDIQKL | 442 | 8 | 62 | 97 | | | | | | 1651 |
| POL | IQKLVGKL | 446 | 8 | 62 | 97 | | | | | | 1652 |
| POL | LVGKLNWA | 449 | 8 | 61 | 95 | | | | | | 1653 |
| POL | KLNWASQI | 452 | 8 | 61 | 95 | | | | | | 1654 |
| POL | QIYAGIKV | 458 | 8 | 27 | 43 | | | | | | 1655 |
| POL | QIYPGIKV | 458 | 8 | 27 | 43 | | | | | | 1656 |
| POL | KVKQLCKL | 464 | 8 | 29 | 45 | | | | | | 1657 |
| POL | KVRQLCKL | 464 | 8 | 19 | 30 | | | | | | 1658 |
| POL | KLLRGAKA | 470 | 8 | 25 | 40 | | | | | | 1659 |
| POL | KLLRGTKA | 470 | 8 | 24 | 38 | | | | | | 1660 |
| POL | LLRGAKAL | 471 | 8 | 30 | 47 | | | | | | 1661 |
| POL | LLRGTKAL | 471 | 8 | 24 | 38 | | | | | | 1662 |
| POL | GAKALTDI | 474 | 8 | 25 | 39 | | | | | | 1663 |
| POL | GTKALTEV | 474 | 8 | 19 | 30 | | | | | | 1664 |
| POL | ALTDIVPL | 477 | 8 | 21 | 33 | | | | | | 1665 |
| POL | ALTEVIPL | 477 | 8 | 16 | 25 | | | | | | 1666 |
| POL | LTDIVPLT | 478 | 8 | 23 | 36 | | | | | | 1667 |
| POL | LTEVIPLT | 478 | 8 | 16 | 25 | | | | | | 1668 |
| POL | IVPLTEEA | 481 | 8 | 13 | 20 | | | | | | 1669 |
| POL | VIPLTEEA | 481 | 8 | 11 | 17 | | | | | | 1670 |
| POL | PLTEEAEL | 483 | 8 | 30 | 47 | | | | | | 1671 |
| POL | ELAENREI | 491 | 8 | 57 | 89 | | | | | | 1672 |
| POL | LAENREIL | 492 | 8 | 57 | 89 | | | | | | 1673 |
| POL | KQGQDQWT | 523 | 8 | 15 | 23 | | | | | | 1674 |
| POL | KQGQGQWT | 523 | 8 | 25 | 39 | | | | | | 1675 |
| POL | YQEPFKNL | 534 | 8 | 43 | 67 | | | | | | 1676 |
| POL | NLKTGKYA | 540 | 8 | 58 | 92 | | | | | | 1677 |
| POL | KTGKYAKM | 542 | 8 | 19 | 30 | | | | | | 1678 |
| POL | KTGKYARM | 542 | 8 | 13 | 21 | | | | | | 1679 |
| POL | RTAIITNDV | 550 | 8 | 11 | 17 | | | | | | 1680 |
| POL | IINDVKQL | 553 | 8 | 49 | 77 | | | | | | 1681 |
| POL | DVKQLTEA | 556 | 8 | 33 | 52 | | | | | | 1682 |
| POL | LTEAVQKI | 560 | 8 | 34 | 53 | | | | | | 1683 |
| POL | EAVQKIAT | 562 | 8 | 11 | 17 | | | | | | 1684 |
| POL | KIATESIV | 566 | 8 | 14 | 22 | | | | | | 1685 |
| POL | IATESIVI | 567 | 8 | 14 | 22 | | | | | | 1686 |
| POL | SIVIWGKT | 571 | 8 | 42 | 66 | | | | | | 1687 |
| POL | KLPIQKET | 582 | 8 | 20 | 31 | | | | | | 1688 |
| POL | RLPIQKET | 582 | 8 | 26 | 41 | | | | | | 1689 |
| POL | IQKETWEA | 585 | 8 | 15 | 23 | | | | | | 1690 |
| POL | IQKETWET | 585 | 8 | 27 | 42 | | | | | | 1691 |
| POL | ETWEAWWT | 588 | 8 | 11 | 17 | | | | | | 1692 |
| POL | ETWETWWT | 588 | 8 | 22 | 34 | | | | | | 1693 |
| POL | WIDYWQAT | 594 | 8 | 15 | 23 | | | | | | 1694 |
| POL | WTEYWQAT | 594 | 8 | 24 | 38 | | | | | | 1695 |
| POL | WIPEWEFV | 602 | 8 | 52 | 84 | | | | | | 1696 |
| POL | FVNTPPLV | 608 | 8 | 54 | 86 | | | | | | 1697 |
| POL | NTPPLVKL | 610 | 8 | 57 | 89 | | | | | | 1698 |
| POL | LVKLWYQL | 614 | 8 | 58 | 91 | | | | | | 1699 |
| POL | KLWYQLET | 616 | 8 | 12 | 19 | | | | | | 1700 |
| POL | YQLEKDPI | 619 | 8 | 14 | 22 | | | | | | 1701 |
| POL | YQLEKEPI | 619 | 8 | 31 | 48 | | | | | | 1702 |
| POL | YQLETEPI | 619 | 8 | 11 | 17 | | | | | | 1703 |
| POL | QLEKEPIV | 620 | 8 | 16 | 25 | | | | | | 1704 |
| POL | ETFYVDGA | 630 | 8 | 55 | 86 | | | | | | 1705 |
| POL | AANRETKL | 637 | 8 | 30 | 47 | | | | | | 1706 |
| POL | KLGKAGYV | 643 | 8 | 36 | 56 | | | | | | 1707 |
| POL | RQKVVSLT | 655 | 8 | 19 | 30 | | | | | | 1708 |
| POL | KVVSLTET | 657 | 8 | 11 | 17 | | | | | | 1709 |
| POL | VVSLTDTT | 658 | 8 | 10 | 16 | | | | | | 1710 |
| POL | VVSLTETT | 658 | 8 | 11 | 17 | | | | | | 1711 |
| POL | TTNQKTEL | 664 | 8 | 55 | 86 | | | | | | 1712 |
| POL | NQKTELIIA | 666 | 8 | 12 | 19 | | | | | | 1713 |
| POL | NQKIELQA | 666 | 8 | 42 | 66 | | | | | | 1714 |
| POL | ELQAIIILA | 670 | 8 | 16 | 25 | | | | | | 1715 |
| POL | ELQAIYLA | 670 | 8 | 12 | 19 | | | | | | 1716 |
| POL | LQAIIILAL | 671 | 8 | 16 | 25 | | | | | | 1717 |
| POL | LQAIYLAL | 671 | 8 | 12 | 19 | | | | | | 1718 |
| POL | LALQDSGL | 676 | 8 | 27 | 42 | | | | | | 1719 |
| POL | LQDSGLEV | 678 | 8 | 27 | 42 | | | | | | 1720 |
| POL | LQDSGSEV | 678 | 8 | 25 | 39 | | | | | | 1721 |
| POL | GLEVNIVT | 682 | 8 | 26 | 41 | | | | | | 1722 |
| POL | IVTDSQYA | 687 | 8 | 61 | 95 | | | | | | 1723 |
| POL | VTDSQYAL | 688 | 8 | 59 | 92 | | | | | | 1724 |
| POL | SQYALGII | 691 | 8 | 59 | 92 | | | | | | 1725 |
| POL | YALGIIQA | 693 | 8 | 58 | 91 | | | | | | 1726 |
| POL | NQIIEQLI | 711 | 8 | 24 | 38 | | | | | | 1727 |
| POL | SQIIEQLI | 711 | 8 | 20 | 31 | | | | | | 1728 |
| POL | QLIKKEKV | 716 | 8 | 28 | 44 | | | | | | 1729 |
| POL | WVPAIIKGI | 727 | 8 | 63 | 98 | | | | | | 1730 |
| POL | GIGGNEQV | 733 | 8 | 59 | 92 | | | | | | 1731 |
| POL | QVDKLVSA | 739 | 8 | 16 | 25 | | | | | | 1732 |
| POL | SAGIRKVL | 745 | 8 | 15 | 23 | | | | | | 1733 |
| POL | GIRKVLFL | 747 | 8 | SI | 80 | | | | | | 1734 |
| POL | KVLFLDGI | 750 | 8 | 50 | 78 | | | | | | 1735 |
| POL | FLDGIDKA | 753 | 8 | 55 | 86 | | | | | | 1736 |
| POL | AMASDFNL | 773 | 8 | 45 | 70 | | | | | | 1737 |
| POL | PIVAKEIV | 782 | 8 | 26 | 41 | | | | | | 1738 |
| POL | PVVAKEIV | 782 | 8 | 28 | 44 | | | | | | 1739 |
| POL | IVAKEIVA | 783 | 8 | 26 | 41 | | | | | | 1740 |
| POL | VVAKEIVA | 783 | 8 | 31 | 48 | | | | | | 1741 |
| POL | CQLKGEAM | 795 | 8 | 53 | 83 | | | | | | 1742 |
| POL | QVDCSPGI | 805 | 8 | 57 | 89 | | | | | | 1743 |
| POL | GIWQLDCT | 811 | 8 | 59 | 92 | | | | | | 1744 |
| POL | WQLDCTIIL | 813 | 8 | 61 | 95 | | | | | | 1745 |
| POL | CTIILEGKI | 817 | 8 | 35 | 55 | | | | | | 1746 |
| POL | CTHLEGKV | 817 | 8 | 26 | 41 | | | | | | 1747 |
| POL | IILEGKIIL | 819 | 8 | 31 | 48 | | | | | | 1748 |
| POL | IILEGKVIL | 819 | 8 | 23 | 36 | | | | | | 1749 |
| POL | IILVAVIIV | 824 | 8 | 30 | 47 | | | | | | 1750 |
| POL | VILVAVIIV | 824 | 8 | 24 | 38 | | | | | | 1751 |
| POL | ILVAVHVA | 825 | 8 | 54 | 84 | | | | | | 1752 |
| POL | VASGYIEA | 831 | 8 | 52 | 81 | | | | | | 1753 |
| POL | PAETGQET | 842 | 8 | 58 | 91 | | | | | | 1754 |
| POL | GQETAYFI | 846 | 8 | 31 | 48 | | | | | | 1755 |
| POL | GQETAYFL | 846 | 8 | 26 | 41 | | | | | | 1756 |
| POL | TAYIILKL | 849 | 8 | 32 | 50 | | | | | | 1757 |
| POL | TAYFLLKL | 849 | 8 | 27 | 42 | | | | | | 1758 |
| POL | KLAGRWPV | 855 | 8 | 59 | 92 | | | | | | 1759 |
| POL | FTSAAVKA | 873 | 8 | 28 | 44 | | | | | | 1760 |
| POL | FTSTTVKA | 873 | 8 | 14 | 22 | | | | | | 1761 |
| POL | AACWWAGI | 880 | 8 | 32 | 50 | | | | | | 1762 |
| POL | GIKQEFGI | 886 | 8 | 22 | 34 | | | | | | 1763 |
| POL | GIQQEFGI | 886 | 8 | 11 | 17 | | | | | | 1764 |
| POL | SQGVVESM | 899 | 8 | 53 | 83 | | | | | | 1765 |
| POL | DQAEIILKT | 919 | 8 | 46 | 72 | | | | | | 1766 |
| POL | EQAEIILKT | 919 | 8 | 13 | 20 | | | | | | 1767 |
| POL | QAEHLKTA | 920 | 8 | 59 | 92 | | | | | | 1768 |
| POL | IILKTAVQM | 923 | 8 | 57 | 89 | | | | | | 1769 |
| POL | KTAVQMAV | 925 | 8 | 57 | 89 | | | | | | 1770 |
| POL | AVQMAVFI | 927 | 8 | 60 | 94 | | | | | | 1771 |
| POL | RIIDIIAT | 951 | 8 | 29 | 45 | | | | | | 1772 |
| POL | RIVDIIAT | 951 | 8 | 12 | 19 | | | | | | 1773 |
| POL | IIASDIQT | 955 | 8 | 15 | 23 | | | | | | 1774 |
| POL | IIATDIQT | 955 | 8 | 41 | 64 | | | | | | 1775 |
| POL | LQKQIIKI | 965 | 8 | 13 | 20 | | | | | | 1776 |
| POL | LQKQITKI | 965 | 8 | 36 | 56 | | | | | | 1777 |
| POL | LLWKGEGA | 993 | 8 | 62 | 97 | | | | | | 1778 |
| POL | VIQDNSDI | 1003 | 8 | 37 | 58 | | | | | | 1779 |
| POL | VIQDNSEI | 1003 | 8 | 12 | 19 | | | | | | 1780 |
| POL | KVVPRRKA | 1011 | 8 | 52 | 81 | | | | | | 1781 |
| POL | KVVPRRKV | 1011 | 8 | 11 | 17 | | | | | | 1782 |
| POL | QMAGDDCV | 1027 | 8 | 44 | 69 | | | | | | 1783 |
| POL | MAGDDCVA | 1028 | 8 | 44 | 69 | | | | | | 1784 |
| POL | NLAFPQGEA | 5 | 9 | 10 | 16 | | | | | | 1785 |
| POL | NLAFQQGEA | 5 | 9 | 16 | 25 | | | | | | 1786 |
| POL | EQTRANSPT | 20 | 9 | 26 | 41 | | | | | | 1787 |
| POL | SQTRANSPT | 34 | 9 | 01 | 33 | | | | | | 1788 |
| POL | QTRANSPTT | 35 | 9 | 01 | 33 | | | | | | 1789 |
| POL | EAGADRQGT | 64 | 9 | 10 | 16 | | | | | | 1790 |
| POL | GQRQGTVSL | 69 | 9 | 01 | 17 | | | | | | 1791 |
| POL | GTTLNFPQI | 79 | 9 | 01 | 17 | | | | | | 1792 |
| POL | AISLSLPQI | 80 | 9 | 01 | 33 | | | | | | 1793 |
| POL | GTLNCPQIT | 80 | 9 | 01 | 33 | | | | | | 1794 |
| POL | PTFNFPQIT | 80 | 9 | 01 | 33 | | | | | | 1795 |
| POL | QITLWQRPL | 89 | 9 | 47 | 73 | | | | | | 1796 |
| POL | ITLWQRPLV | 90 | 9 | 47 | 73 | | | | | | 1797 |
| POL | TLWQRPLVT | 91 | 9 | 39 | 61 | 0.0185 | 0.0002 | 0.0040 | 0.0002 | 0.0140 | 1798 |
| POL | VTIKIGGQL | 98 | 9 | 17 | 27 | | | | | | 1799 |
| POL | VTVKIGGQL | 98 | 9 | 11 | 17 | | | | | | 1800 |
| POL | KIGGQLKEA | 101 | 9 | 23 | 36 | | | | | | 1801 |
| POL | QLIEALLDT | 105 | 9 | 10 | 16 | | | | | | 1802 |
| POL | QLKEALLDT | 105 | 9 | 34 | 53 | | | | | | 1803 |
| POL | LLDTGADDT | 110 | 9 | 63 | 98 | | | | | | 1804 |
| POL | DTGADDTVL | 112 | 9 | 61 | 95 | | | | | | 1805 |
| POL | DTVLEDINL | 117 | 9 | 13 | 20 | | | | | | 1806 |
| POL | DTVLEEINL | 117 | 9 | 14 | 22 | | | | | | 1807 |
| POL | MIGGIGGFI | 133 | 9 | 62 | 97 | 0.0025 | | | | | 1808 |
| POL | KVRQYDQIL | 142 | 9 | 21 | 33 | 0.0001 | | | | | 1809 |
| POL | LIEICGIIKA | 150 | 9 | 10 | 16 | | | | | | 1810 |
| POL | LIEICGKKA | 150 | 9 | 13 | 20 | | | | | | 1811 |
| POL | TVLVGPTPV | 161 | 9 | 53 | 83 | 0.0047 | | | | | 1812 |
| POL | LVGPTPVNI | 163 | 9 | 54 | 84 | 0.0110 | 0.0280 | 0.5200 | 0.0013 | 0.5900 | 1813 |
| POL | PVNIIGRNL | 168 | 9 | 26 | 41 | 0.0001 | | | | | 1814 |
| POL | PVNIIGRNM | 168 | 9 | 24 | 38 | | | | | | 1815 |
| POL | NIIGRNLLT | 170 | 9 | 26 | 41 | | | | | | 1816 |
| POL | NIIGRNMLT | 170 | 9 | 30 | 47 | | | | | | 1817 |
| POL | NLLIQIGCT | 175 | 9 | 21 | 33 | | | | | | 1818 |
| POL | NMLTQIUCT | 175 | 9 | 18 | 28 | | | | | | 1819 |
| POL | NMLTQLGCT | 175 | 9 | 10 | 16 | | | | | | 1820 |
| POL | LLTQIGCTL | 176 | 9 | 21 | 33 | 0.0002 | | | | | 1821 |
| POL | MLTQIGCTL | 176 | 9 | 18 | 28 | | | | | | 1822 |
| POL | MLTQLGCTL | 176 | 9 | 10 | 16 | | | | | | 1823 |
| POL | TLNFPISPI | 183 | 9 | 61 | 97 | 0.0660 | 0.0029 | 9.3000 | 0.0019 | 0.7000 | 1824 |
| POL | PIETVPVKL | 190 | 9 | 53 | 83 | 0.0001 | | | | | 1825 |
| POL | PLTEEKIKA | 212 | 9 | 54 | 84 | | | | | | 1826 |
| POL | LTEEKIKAL | 213 | 9 | 56 | 88 | | | | | | 1827 |
| POL | ALVEICTEM | 220 | 9 | 15 | 23 | 0.0230 | 0.0230 | 0.0710 | 0.0140 | 0.0140 | 1828 |
| POL | FAIKKKDST | 250 | 9 | 59 | 92 | | | | | | 1829 |
| POL | TQDFWEVQL | 273 | 9 | 55 | 86 | | | | | | 1830 |
| POL | VQLGIPIIPA | 279 | 9 | 54 | 84 | | | | | | 1831 |
| POL | GLKKKKSVT | 288 | 9 | 49 | 77 | | | | | | 1832 |
| POL | VTVLDVGDA | 295 | 9 | 57 | 89 | | | | | | 1833 |
| POL | DVGDAYFSV | 299 | 9 | 54 | 84 | 0.0005 | | | | | 1834 |
| POL | YTAFTIPSI | 316 | 9 | 37 | 58 | 0.1900 | 0.7100 | 1.1000 | 0.5300 | 2.4000 | 1835 |
| POL | YTAFTIPST | 316 | 9 | 13 | 20 | | | | | | 1836 |
| POL | TIPSINNET | 320 | 9 | 37 | 58 | | | | | | 1837 |
| POL | TIPSTNNET | 320 | 9 | 14 | 22 | | | | | | 1838 |
| POL | SINNETPGI | 323 | 9 | 32 | 50 | | | | | | 1839 |
| POL | STNNETPGI | 323 | 9 | 11 | 17 | | | | | | 1840 |
| POL | GIRYQYNYL | 330 | 9 | 52 | 81 | 0.0001 | | | | | 1841 |
| POL | PQGWKGSPA | 339 | 9 | 59 | 92 | | | | | | 1842 |
| POL | PAIFQSSMT | 346 | 9 | 39 | 61 | | | | | | 1843 |
| POL | FQSSMTKIL | 349 | 9 | 38 | 59 | | | | | | 1844 |
| POL | VIYQYMDDL | 368 | 9 | 51 | 80 | 0.0004 | | | | | 1845 |
| POL | YQYMDDLYV | 370 | 9 | 61 | 95 | | | | | | 1846 |
| POL | DLEIGQIIRA | 381 | 9 | 28 | 44 | | | | | | 1847 |
| POL | DLEIGQIIRT | 381 | 9 | 21 | 33 | | | | | | 1848 |
| POL | EIGQIIRAKI | 383 | 9 | 26 | 41 | | | | | | 1849 |
| POL | EIGQIIRTKI | 383 | 9 | 21 | 33 | | | | | | 1850 |
| POL | KIEELREIIL | 390 | 9 | 19 | 30 | | | | | | 1851 |
| POL | KIEELRQIIL | 390 | 9 | 17 | 27 | 0.0001 | | | | | 1852 |
| POL | HLLKWGFTT | 397 | 9 | 22 | 34 | | | | | | 1853 |
| POL | HLLRWGFTT | 397 | 9 | 24 | 38 | | | | | | 1854 |
| POL | ELHPDKWTV | 422 | 9 | 60 | 94 | 0.0001 | | | | | 1855 |
| POL | QLPEKDSWT | 434 | 9 | 13 | 20 | | | | | | 1856 |
| POL | VLPEKDSWT | 434 | 9 | 13 | 20 | | | | | | 1857 |
| POL | WTVNDIQKL | 441 | 9 | 62 | 97 | 0.0001 | | | | | 1858 |
| POL | TVNDIQKLV | 442 | 9 | 61 | 95 | 0.0001 | | | | | 1859 |
| POL | DIQKLVGKL | 445 | 9 | 62 | 97 | 0.0001 | | | | | 1860 |
| POL | KLVGKLNWA | 448 | 9 | 61 | 95 | 0.0840 | 0.3400 | 1.7000 | 0.0930 | 0.0130 | 1861 |
| POL | WASQIYAGI | 455 | 9 | 27 | 42 | 0.0020 | | | | | 1862 |
| POL | WASQIYPGI | 455 | 9 | 29 | 45 | | | | | | 1863 |
| POL | SQIYAGIKV | 457 | 9 | 27 | 42 | | | | | | 1864 |
| POL | SQIYPGIKV | 457 | 9 | 27 | 42 | | | | | | 1865 |
| POL | YAGIKVKQL | 460 | 9 | 18 | 28 | | | | | | 1866 |
| POL | KVKQLCKLL | 464 | 9 | 28 | 44 | | | | | | 1867 |
| POL | KVRQLCKLL | 464 | 9 | 19 | 30 | | | | | | 1868 |
| POL | QLCKLLRGA | 467 | 9 | 25 | 39 | | | | | | 1869 |
| POL | QLCKLLRGT | 467 | 9 | 21 | 33 | | | | | | 1870 |
| POL | KLLRGAKAL | 470 | 9 | 25 | 40 | | | | | | 1871 |
| POL | KLLRGTKAL | 470 | 9 | 24 | 38 | 0.0069 | | | | | 1872 |
| POL | LLRGAKALT | 471 | 9 | 30 | 47 | | | | | | 1873 |
| POL | LLRGTKALT | 471 | 9 | 24 | 38 | | | | | | 1874 |
| POL | GAKALTDIV | 474 | 9 | 24 | 38 | | | | | | 1875 |
| POL | GTKALTEVI | 474 | 9 | 11 | 17 | | | | | | 1876 |
| POL | KALTDIVPL | 476 | 9 | 21 | 33 | | | | | | 1877 |
| POL | KALTEVIPL | 476 | 9 | 16 | 25 | | | | | | 1878 |
| POL | ALTDIVPLT | 477 | 9 | 21 | 33 | | | | | | 1879 |
| POL | ALTIWIPLT | 477 | 9 | 16 | 25 | | | | | | 1880 |
| POL | DIVPLTEEA | 480 | 9 | 13 | 20 | | | | | | 1881 |
| POL | EVIPLTEEA | 480 | 9 | 11 | 17 | | | | | | 1882 |
| POL | LTEEAELEL | 484 | 9 | 37 | 58 | | | | | | 1883 |
| POL | ELAENREIL | 491 | 9 | 57 | 89 | 0.0001 | | | | | 1884 |
| POL | ILKEPVIIGV | 498 | 9 | 41 | 64 | 0.0055 | | | | | 1885 |
| POL | GQDQWIYQI | 525 | 9 | 13 | 20 | | | | | | 1886 |
| POL | GQGQWTYQI | 525 | 9 | 25 | 39 | | | | | | 1887 |
| POL | YAKMRTAlIT | 546 | 9 | 10 | 16 | | | | | | 1888 |
| POL | YARMRGAIIT | 546 | 9 | 13 | 20 | | | | | | 1889 |
| POL | IITNDVKQLT | 553 | 9 | 43 | 67 | | | | | | 1890 |
| POL | DVKQLTEAV | 556 | 9 | 33 | 52 | 0.0001 | | | | | 1891 |
| POL | QLTEAVQKI | 559 | 9 | 34 | 53 | 0.0007 | | | | | 1892 |
| POL | LWAVQKIA | 560 | 9 | 26 | 41 | | | | | | 1893 |
| POL | VQKIATESI | 564 | 9 | 14 | 22 | | | | | | 1894 |
| POL | KIATESIVI | 566 | 9 | 14 | 22 | | | | | | 1895 |
| POL | KTPKFKLPI | 577 | 9 | 17 | 27 | | | | | | 1896 |
| POL | KTPKFRLPI | 577 | 9 | 29 | 45 | | | | | | 1897 |
| POL | PIQKETWEA | 584 | 9 | 15 | 23 | | | | | | 1898 |
| POL | PIQKETWET | 584 | 9 | 27 | 42 | | | | | | 1899 |
| POL | PLVKLWYQL | 613 | 9 | 54 | 84 | 0.0002 | | | | | 1900 |
| POL | YQLEKEPIV | 619 | 9 | 16 | 25 | | | | | | 1901 |
| POL | IVGAETFYV | 626 | 9 | 28 | 44 | 0.0099 | | | | | 1902 |
| POL | ETFYVDGAA | 630 | 9 | 51 | 80 | | | | | | 1903 |
| POL | GAANRETKL | 636 | 9 | 30 | 47 | | | | | | 1904 |
| POL | KLGKAGYVT | 643 | 9 | 36 | 56 | 0.0002 | | | | | 1905 |
| POL | VTDRGRQKV | 650 | 9 | 30 | 47 | | | | | | 1906 |
| POL | KVVSLTETT | 657 | 9 | 11 | 17 | | | | | | 1907 |
| POL | LTDTTNQKT | 661 | 9 | 19 | 30 | | | | | | 1908 |
| POL | LTETTNQKT | 661 | 9 | 25 | 39 | | | | | | 1909 |
| POL | DTTNQKTEL | 663 | 9 | 26 | 41 | | | | | | 1910 |
| POL | ETTNQKTEL | 663 | 9 | 29 | 45 | | | | | | 1911 |
| POL | NQKTELHAI | 666 | 9 | 12 | 19 | | | | | | 1912 |
| POL | NQKTELQAI | 666 | 9 | 42 | 66 | | | | | | 1913 |
| POL | KTELQAIIIL | 668 | 9 | 15 | 23 | | | | | | 1914 |
| POL | KTELQAIYL | 668 | 9 | 12 | 19 | | | | | | 1915 |
| POL | ELQAIIILAL | 670 | 9 | 16 | 25 | 0.0001 | | | | | 1916 |
| POL | ELQAIYLAL | 670 | 9 | 12 | 19 | | | | | | 1917 |
| POL | IILALQDSGL | 675 | 9 | 15 | 23 | 0.0005 | | | | | 1918 |
| POL | ALQDSGLEV | 677 | 9 | 27 | 42 | 0.0083 | | | | | 1919 |
| POL | ALQDSGSEV | 677 | 9 | 25 | 39 | | | | | | 1920 |
| POL | NIVTDSQYA | 686 | 9 | 61 | 95 | | | | | | 1921 |
| POL | IVTDSQYAL | 687 | 9 | 59 | 92 | 0.0024 | | | | | 1922 |
| POL | LVNQIIEQL | 709 | 9 | 19 | 30 | | | | | | 1923 |
| POL | LVSQIIEQL | 709 | 9 | 19 | 30 | | | | | | 1924 |
| POL | EQLIKKEKV | 715 | 9 | 28 | 44 | | | | | | 1925 |
| POL | LIKKEKVYL | 717 | 9 | 35 | 55 | 0.0001 | | | | | 1926 |
| POL | KVYLAWVPA | 722 | 9 | 20 | 32 | | | | | | 1927 |
| POL | KVYLSWVPA | 722 | 9 | 23 | 37 | | | | | | 1928 |
| POL | EQVDKLVSA | 738 | 9 | 16 | 25 | | | | | | 1929 |
| POL | LVSAGIRKV | 743 | 9 | 15 | 23 | 0.0001 | | | | | 1930 |
| POL | LVSSGIRKV | 743 | 9 | 26 | 41 | | | | | | 1931 |
| POL | RAMASDFNL | 772 | 9 | 41 | 64 | 0.0230 | 0.0370 | 0.0004 | 0.0710 | 0.0130 | 1932 |
| POL | PIVAKEIVA | 782 | 9 | 25 | 39 | | | | | | 1933 |
| POL | PYVAKEIVA | 782 | 9 | 28 | 44 | | | | | | 1934 |
| POL | VASCDKCQL | 789 | 9 | 43 | 67 | | | | | | 1935 |
| POL | GQVDCSPGI | 804 | 9 | 57 | 89 | | | | | | 1936 |
| POL | CTHLEGKII | 817 | 9 | 35 | 55 | | | | | | 1937 |
| POL | CTIILEGKVI | 817 | 9 | 26 | 41 | | | | | | 1938 |
| POL | HLEGKIILV | 819 | 9 | 31 | 48 | 0.0010 | | | | | 1939 |
| POL | lILEGKVILV | 819 | 9 | 23 | 36 | 0.0006 | | | | | 1940 |
| POL | KIILVAVHV | 823 | 9 | 30 | 47 | 0.0002 | | | | | 1941 |
| POL | KVILVAVHV | 823 | 9 | 23 | 36 | 0.0001 | | | | | 1942 |
| POL | IILVAVIIVA | 824 | 9 | 30 | 47 | | | | | | 1943 |
| POL | VILVAVIIVA | 824 | 9 | 23 | 36 | | | | | | 1944 |
| POL | AVIIVASGYI | 828 | 9 | 53 | 83 | | | | | | 1945 |
| POL | IIVASGYIEA | 830 | 9 | 52 | 81 | | | | | | 1946 |
| POL | YIEAEVIPA | 835 | 9 | 53 | 83 | | | | | | 1947 |
| POL | EAEVIPAET | 837 | 9 | 62 | 98 | | | | | | 1948 |
| POL | PAETGQETA | 842 | 9 | 58 | 91 | | | | | | 1949 |
| POL | GQETAYFIL | 846 | 9 | 31 | 48 | | | | | | 1950 |
| POL | GQETAYFLL | 846 | 9 | 26 | 41 | | | | | | 1951 |
| POL | ETAYFILKL | 848 | 9 | 31 | 48 | | | | | | 1952 |
| POL | ETAYFLLKL | 848 | 9 | 27 | 42 | | | | | | 1953 |
| POL | TAYFILKLA | 849 | 9 | 32 | 50 | | | | | | 1954 |
| POL | TAYFLLKLA | 849 | 9 | 27 | 42 | | | | | | 1955 |
| POL | LAGRWPVKT | 856 | 9 | 14 | 22 | | | | | | 1956 |
| POL | LAGRWPVKV | 856 | 9 | 30 | 47 | | | | | | 1957 |
| POL | HTDNGSNFT | 866 | 9 | 49 | 77 | | | | | | 1958 |
| POL | FTSAAVKAA | 873 | 9 | 27 | 42 | | | | | | 1959 |
| POL | FTSTTVKAA | 873 | 9 | 14 | 22 | | | | | | 1960 |
| POL | AVKAACWWA | 877 | 9 | 32 | 50 | | | | | | 1961 |
| POL | TVKAACWWA | 877 | 9 | 23 | 36 | | | | | | 1962 |
| POL | KAACWWAGI | 879 | 9 | 31 | 49 | 0.0180 | 0.0040 | 0.1200 | 0.0230 | 0.0150 | 1963 |
| POL | VVESMNKEL | 902 | 9 | 48 | 75 | | | | | | 1964 |
| POL | SMNKELKKI | 905 | 9 | 53 | 83 | | | | | | 1965 |
| POL | ELKKIIGQV | 909 | 9 | 57 | 89 | 0.0001 | | | | | 1966 |
| POL | IIGQVRDQA | 913 | 9 | 44 | 69 | | | | | | 1967 |
| POL | IIGQVREQA | 913 | 9 | 13 | 20 | | | | | | 1968 |
| POL | QVRDQAEHL | 916 | 9 | 48 | 75 | 0.0001 | | | | | 1969 |
| POL | QVREQAEIIL | 916 | 9 | 13 | 20 | | | | | | 1970 |
| POL | DQAEIILKTA | 919 | 9 | 46 | 72 | | | | | | 1971 |
| POL | EQAEIILKTA | 919 | 9 | 13 | 20 | | | | | | 1972 |
| POL | QAEIILKTAV | 920 | 9 | 59 | 92 | | | | | | 1973 |
| POL | IILKTAVQMA | 923 | 9 | 57 | 89 | 0.0033 | | | | | 1974 |
| POL | TAVQMAVFI | 926 | 9 | 59 | 92 | | | | | | 1975 |
| POL | SAGERIIDI | 947 | 9 | 41 | 64 | | | | | | 1976 |
| POL | SAGERIYDI | 947 | 9 | 14 | 22 | | | | | | 1977 |
| POL | IIDIIASDI | 952 | 9 | 12 | 19 | | | | | | 1978 |
| POL | IIDIIATDI | 952 | 9 | 29 | 45 | | | | | | 1979 |
| POL | IVDIIATDI | 952 | 9 | 12 | 19 | | | | | | 1980 |
| POL | DIIASDIQT | 954 | 9 | 15 | 23 | | | | | | 1981 |
| POL | DIIATDIQT | 954 | 9 | 40 | 63 | | | | | | 1982 |
| POL | ATDIQTKEL | 957 | 9 | 35 | 55 | | | | | | 1983 |
| POL | QTKELQKQI | 961 | 9 | 46 | 72 | | | | | | 1984 |
| POL | ELQKQIIKI | 964 | 9 | 13 | 21 | | | | | | 1985 |
| POL | ELQKQITKI | 964 | 9 | 34 | 54 | | | | | | 1986 |
| POL | IIKIQNFRV | 969 | 9 | 12 | 19 | | | | | | 1987 |
| POL | ITKIQNFRV | 969 | 9 | 36 | 57 | | | | | | 1988 |
| POL | PIWKGPAKL | 985 | 9 | 36 | 56 | | | | | | 1989 |
| POL | PLWKGPAKL | 985 | 9 | 19 | 30 | | | | | | 1990 |
| POL | KLLWKGEGA | 992 | 9 | 60 | 94 | 0.0002 | | | | | 1991 |
| POL | LLWKGEGAV | 993 | 9 | 62 | 97 | 0.0230 | | | | | 1992 |
| POL | VVIQDNSDI | 1002 | 9 | 37 | 58 | 0.0001 | | | | | 1993 |
| POL | VVIQDNSEI | 1002 | 9 | 12 | 19 | | | | | | 1994 |
| POL | IQDNSDIKV | 1004 | 9 | 38 | 59 | | | | | | 1995 |
| POL | IQDNSEIKV | 1004 | 9 | 12 | 19 | | | | | | 1996 |
| POL | VVPRRKAKI | 1012 | 9 | 51 | 80 | | | | | | 1997 |
| POL | VVPRRKVKI | 1012 | 9 | 11 | 17 | | | | | | 1998 |
| POL | IIKDYGKQM | 1020 | 9 | 11 | 17 | | | | | | 1999 |
| POL | IIRDYCKQM | 1020 | 9 | 50 | 78 | | | | | | 2000 |
| POL | KQMAGDDCV | 1026 | 9 | 44 | 69 | | | | | | 2001 |
| POL | QMAGDDCVA | 1027 | 9 | 44 | 69 | 0.0001 | | | | | 2002 |
| POL | KAREFSSEQT | 12 | 10 | 10 | 16 | | | | | | 2003 |
| POL | RANSPTRREL | 26 | 10 | 16 | 25 | | | | | | 2004 |
| POL | RANSPTSREL | 26 | 10 | 10 | 16 | | | | | | 2005 |
| POL | STNSPTSREL | 32 | 10 | 01 | 33 | | | | | | 2006 |
| POL | SQTRANSPTT | 34 | 10 | 01 | 33 | | | | | | 2007 |
| POL | RANSPSSREL | 35 | 10 | 01 | 33 | | | | | | 2008 |
| POL | RANSPTTREL | 37 | 10 | 01 | 50 | | | | | | 2009 |
| POL | GAISLSLPQI | 79 | 10 | 01 | 17 | | | | | | 2010 |
| POL | GTTLNFPQIT | 79 | 10 | 01 | 17 | | | | | | 2011 |
| POL | AISLSLPQIT | 80 | 10 | 01 | 33 | | | | | | 2012 |
| POL | GTLNCPQITL | 80 | 10 | 01 | 33 | | | | | | 2013 |
| POL | PTFNFPQITL | 80 | 10) | 01 | 33 | | | | | | 2014 |
| POL | PQITLWQRPL | 88 | 10 | 47 | 73 | | | | | | 2015 |
| POL | QITLWQRPLV | 89 | 10 | 47 | 73 | | | | | | 2016 |
| POL | ITLWQRPLVT | 90 | 10 | 37 | 58 | | | | | | 2017 |
| POL | TLWQRPLVTI | 91 | 10 | 21 | 33 | | | | | | 2018 |
| POL | TLWQRPLVTV | 91 | 10 | 18 | 28 | | | | | | 2019 |
| POL | WQRPLVTIKI | 93 | 10 | 14 | 22 | | | | | | 2020 |
| POL | WQRPLVTVKI | 93 | 10 | 12 | 19 | | | | | | 2021 |
| POL | LVTIKIGGQL | 97 | 10 | 13 | 20 | | | | | | 2022 |
| POL | KIGGQLKEAL | 101 | 10 | 23 | 36 | 0.0002 | | | | | 2023 |
| POL | GQLIEALLDT | 104 | 10 | 10 | 16 | | | | | | 2024 |
| POL | GQLKEALLDT | 104 | 10 | 34 | 53 | | | | | | 2025 |
| POL | LIEALLDTGA | 106 | 10 | 10 | 16 | | | | | | 2026 |
| POL | ALLDTGADDT | 109 | 10 | 61 | 95 | | | | | | 2027 |
| POL | LLDTGADDTV | 110 | 10 | 63 | 98 | 0.0005 | | | | | 2028 |
| POL | GADDTVLEDI | 114 | 10 | 15 | 23 | | | | | | 2029 |
| POL | GADDTVLEEI | 114 | 10 | 18 | 28 | | | | | | 2030 |
| POL | GADDTVLEEM | 114 | 10 | 11 | 17 | | | | | | 2031 |
| POL | NLPGKWKPKM | 124 | 10 | 35 | 55 | | | | | | 2032 |
| POL | KMIGGIGGFI | 132 | 10 | 62 | 97 | 0.0290 | 0.0790 | 2.1000 | 0.0048 | 0.0120 | 2033 |
| POL | FIKVRQYDQI | 140 | 10 | 41 | 64 | | | | | | 2034 |
| POL | KVRQYDQILI | 142 | 10 | 20 | 31 | | | | | | 2035 |
| POL | KVRQYDQIPI | 142 | 10 | 13 | 20 | | | | | | 2036 |
| POL | RQYDQILIEI | 144 | 10 | 20 | 31 | | | | | | 2037 |
| POL | RQYDQIPIEI | 144 | 10 | 12 | 19 | | | | | | 2038 |
| POL | ILIEICGKKA | 149 | 10 | 13 | 20 | | | | | | 2039 |
| POL | LIECGIKAI | 150 | 10 | 10 | 16 | | | | | | 2040 |
| POL | LIEICGKKAI | 150 | 10 | 13 | 20 | | | | | | 2041 |
| POL | EICGIIKAIGT | 152 | 10 | 19 | 30 | | | | | | 2042 |
| POL | EICGKKAIGT | 152 | 10 | 24 | 38 | | | | | | 2043 |
| POL | AIGTVLVGPT | 158 | 10 | 52 | 81 | | | | | | 2044 |
| POL | GTVLVGPTPV | 160 | 10 | 53 | 83 | | | | | | 2045 |
| POL | VLVGPTPVNI | 162 | 10 | 53 | 83 | 0.0025 | | | | | 2046 |
| POL | LVGPTPVNII | 163 | 10 | 52 | 81 | 0.0015 | | | | | 2047 |
| POL | PVNIIGRNLL | 168 | 10 | 26 | 41 | 0.0002 | | | | | 2048 |
| POL | PVNIIGRNML | 168 | 10 | 24 | 38 | | | | | | 2049 |
| POL | IIGRNLLIQI | 171 | 10 | 21 | 33 | | | | | | 2050 |
| POL | IIGRNMLTQI | 171 | 10 | 18 | 28 | | | | | | 2051 |
| POL | IIGRNMLTQL | 171 | 10 | 11 | 17 | | | | | | 2052 |
| POL | NLLTQIGCTL | 175 | 10 | 21 | 33 | 0.0007 | | | | | 2053 |
| POL | NMLTQIGCTL | 175 | 10 | 18 | 28 | | | | | | 2054 |
| POL | NMLTQLGCTL | 175 | 10 | 10 | 16 | | | | | | 2055 |
| POL | QIGCTLNFPI | 179 | 10 | 41 | 64 | 0.0025 | | | | | 2056 |
| POL | QLGCTLNFPI | 179 | 10 | 16 | 25 | | | | | | 2057 |
| POL | CTLNFPISPI | 182 | 10 | 60 | 94 | 0.0340 | 0.1800 | 0.3300 | 0.4400 | 0.4000 | 2058 |
| POL | PISPIETVPV | 187 | 10 | 56 | 88 | 0.0002 | | | | | 2059 |
| POL | TVPVKLKVGM | 193 | 10 | 54 | 84 | | | | | | 2060 |
| POL | KQWPLTEEKI | 209 | 10 | 56 | 88 | | | | | | 2061 |
| POL | PLTEEKIKAL | 212 | 10 | 54 | 84 | 0.0002 | | | | | 2062 |
| POL | LTEEKIKALT | 213 | 10 | 37 | 58 | | | | | | 2063 |
| POL | TEEKIKALV | 213 | 10 | 15 | 23 | | | | | | 2064 |
| POL | KIKALTEICT | 217 | 10 | 12 | 19 | | | | | | 2065 |
| POL | KIKALVEICT | 217 | 10 | 15 | 23 | | | | | | 2066 |
| POL | KALVEICTEM | 219 | 10 | 15 | 24 | | | | | | 2067 |
| POL | CTEMEKEGKI | 225 | 10 | 27 | 42 | | | | | | 2068 |
| POL | KIGPENPYNT | 238 | 10 | 50 | 78 | | | | | | 2069 |
| POL | RIGPENPYNT | 238 | 10 | 10 | 16 | | | | | | 2070 |
| POL | RTQDFWEVQL | 272 | 10 | 53 | 83 | | | | | | 2071 |
| POL | EVQLCHPHPA | 278 | 10 | 54 | 84 | | | | | | 2072 |
| POL | QLGIPHPAGL | 280 | 10 | 56 | 89 | 0.0002 | | | | | 2073 |
| POL | PAGLKKKKSV | 286 | 10 | 50 | 78 | | | | | | 2074 |
| POL | GLKKKKSVTV | 288 | 10 | 49 | 77 | 0.0002 | | | | | 2075 |
| POL | SVTVLDVGDA | 294 | 10 | 57 | 89 | | | | | | 2076 |
| POL | PLDKDFRKYT | 308 | 10 | 19 | 30 | | | | | | 2077 |
| POL | FTIVSINNET | 319 | 10 | 37 | 58 | | | | | | 2078 |
| POL | FTIPSTNNET | 319 | 10 | 13 | 20 | | | | | | 2079 |
| POL | PQGWKGSPAI | 339 | 10 | 59 | 92 | | | | | | 2080 |
| POL | AIFQSSMTKI | 347 | 10 | 36 | 56 | | | | | | 2081 |
| POL | IVIYQYMDDL | 367 | 10 | 42 | 66 | 0.0007 | | | | | 2082 |
| POL | DLYVGSDLEI | 375 | 10 | 58 | 91 | 0.0001 | | | | | 2083 |
| POL | GQIIRAKIEEL | 385 | 10 | 25 | 39 | | | | | | 2084 |
| POL | GQIIRTKIEEL | 385 | 10 | 20 | 31 | | | | | | 2085 |
| POL | KIEELREHLL | 390 | 10 | 19 | 30 | | | | | | 2086 |
| POL | KIEELRQIILL | 390 | 10 | 17 | 27 | 0.0002 | | | | | 2087 |
| POL | RQIILLRWGFT | 395 | 10 | 12 | 19 | | | | | | 2088 |
| POL | IIQKEPPFLWM | 410 | 10 | 62 | 97 | | | | | | 2089 |
| POL | IQLPEKDSWT | 433 | 10 | 13 | 20 | | | | | | 2090 |
| POL | IVLPEKDSWT | 433 | 10 | 13 | 20 | | | | | | 2091 |
| POL | QLPEKDSWTV | 434 | 10 | 13 | 20 | | | | | | 2092 |
| POL | VLPEKDSWTV | 434 | 10 | 13 | 20 | 0.0056 | | | | | 2093 |
| POL | WTVNDIQKLV | 441 | 10 | 61 | 95 | 0.0001 | | | | | 2094 |
| POL | KLNWASQIYA | 452 | 10 | 27 | 42 | 0.0230 | 0.0011 | 0.0250 | 0.0006 | 0.0130 | 2095 |
| POL | GIKVKQLCKL | 462 | 10 | 28 | 44 | | | | | | 2096 |
| POL | GIKVRQLCKL | 462 | 10 | 18 | 28 | | | | | | 2097 |
| POL | KQLCKLLRGA | 466 | 10 | 12 | 19 | | | | | | 2098 |
| POL | KQLCKLLRGT | 466 | 10 | 14 | 22 | | | | | | 2099 |
| POL | RQLCKLLRGA | 466 | 10 | 13 | 21 | | | | | | 2100 |
| POL | KLLRGAKALT | 470 | 10 | 25 | 40 | | | | | | 2101 |
| POL | KLLRGTKALT | 470 | 10 | 24 | 38 | | | | | | 2102 |
| POL | KALTDIVPLT | 476 | 10 | 21 | 33 | | | | | | 2103 |
| POL | KALTEVIPLT | 476 | 10 | 16 | 25 | | | | | | 2104 |
| POL | IVPLTEEAEL | 481 | 10 | 13 | 20 | | | | | | 2105 |
| POL | VIPLTEEAEL | 481 | 10 | 11 | 17 | | | | | | 2106 |
| POL | PLTEEAELEL | 483 | 10 | 30 | 47 | | | | | | 2107 |
| POL | LTEEAELELA | 484 | 10 | 36 | 56 | | | | | | 2108 |
| POL | ELELAENREI | 489 | 10 | 53 | 83 | | | | | | 2109 |
| POL | EILKEPVIIGV | 497 | 10 | 41 | 64 | 0.0007 | | | | | 2110 |
| POL | GVYYDPSKDL | 508 | 10 | 38 | 59 | | | | | | 2111 |
| POL | IQKQGQDQWT | 521 | 10 | 12 | 19 | | | | | | 2112 |
| POL | IQKQGQGQWT | 521 | 10 | 15 | 23 | | | | | | 2113 |
| POL | QIYQEPFKNL | 532 | 10 | 40 | 63 | 0.0002 | | | | | 2114 |
| POL | YQEPFKNLKT | 534 | 10 | 43 | 67 | | | | | | 2115 |
| POL | NLKTGKYAKM | 540 | 10 | 18 | 29 | | | | | | 2116 |
| POL | NLKTGKYARM | 540 | 10 | 13 | 21 | | | | | | 2117 |
| POL | KTGKYAKMRT | 542 | 10 | 10 | 16 | | | | | | 2118 |
| POL | RMRGAIITNDV | 548 | 10 | 12 | 19 | | | | | | 2119 |
| POL | GAIITNDVKQL | 551 | 10 | 19 | 30 | | | | | | 2120 |
| POL | SAIITNDVKQL | 551 | 10 | 16 | 25 | | | | | | 2121 |
| POL | TAHTNDVKQL | 551 | 10 | 11 | 17 | | | | | | 2122 |
| POL | KQLTEAVQKI | 558 | 10 | 32 | 51 | | | | | | 2123 |
| POL | QLTEAVQKIA | 559 | 10 | 26 | 41 | | | | | | 2124 |
| POL | LTEAVQKIAT | 560 | 10 | 11 | 17 | | | | | | 2125 |
| POL | AVQKIATESI | 563 | 10 | 10 | 16 | | | | | | 2126 |
| POL | VQKIATESIV | 564 | 10 | 14 | 22 | | | | | | 2127 |
| POL | ETWWTDYWQA | 591 | 10 | 10 | 16 | | | | | | 2128 |
| POL | WTDYWQATWI | 594 | 10 | 14 | 22 | | | | | | 2129 |
| POL | WTEYWQATWI | 594 | 10 | 24 | 38 | | | | | | 2130 |
| POL | ATWIPCWEFV | 600 | 10 | 51 | 80 | 0.0013 | | | | | 2131 |
| POL | WIPEWEFVNT | 602 | 10 | 50 | 81 | | | | | | 2132 |
| POL | FVNTPPLVKL | 608 | 10 | 54 | 86 | 0.0002 | | | | | 2133 |
| POL | LVKLWYQLET | 614 | 10 | 11 | 17 | | | | | | 2134 |
| POL | QLEKEPIVGA | 620 | 10 | 16 | 25 | | | | | | 2135 |
| POL | PIVGAETFYV | 625 | 10 | 28 | 44 | 0.0002 | | | | | 2136 |
| POL | GAETFYVDGA | 628 | 10 | 48 | 75 | | | | | | 2137 |
| POL | YVDGAANRET | 633 | 10 | 45 | 70 | | | | | | 2138 |
| POL | ETKLGKAGYV | 641 | 10 | 35 | 55 | | | | | | 2139 |
| POL | YVTDRGRQKV | 649 | 10 | 29 | 45 | 0.0002 | | | | | 2140 |
| POL | VTDRGRQKVV | 650 | 10 | 28 | 44 | | | | | | 2141 |
| POL | RQKVVSLTET | 655 | 10 | 10 | 16 | | | | | | 2142 |
| POL | SLTDTTNQKT | 660 | 10 | 11 | 17 | | | | | | 2143 |
| POL | SLTETTNQKT | 660 | 10 | 19 | 30 | | | | | | 2144 |
| POL | TTNQKIELIIA | 664 | 10 | 12 | 19 | | | | | | 2145 |
| POL | TINQKTELQA | 664 | 10 | 42 | 66 | | | | | | 2146 |
| POL | KTELQAIIILA | 668 | 10 | 15 | 23 | | | | | | 2147 |
| POL | KTELQAIYLA | 668 | 10 | 12 | 19 | | | | | | 2148 |
| POL | LALQDSGLEV | 676 | 10 | 27 | 42 | 0.0006 | | | | | 2149 |
| POL | LALQDSGSEV | 676 | 10 | 25 | 39 | | | | | | 2150 |
| POL | LQDSGLEVNI | 678 | 10 | 27 | 42 | | | | | | 2151 |
| POL | LQDSGSEVNI | 678 | 10 | 25 | 39 | | | | | | 2152 |
| POL | NIVTDSQYAL | 686 | 10 | 59 | 92 | 0.0004 | | | | | 2153 |
| POL | VTDSQYALGI | 688 | 10 | 58 | 91 | | | | | | 2154 |
| POL | SQYALGIIQA | 691 | 10 | 58 | 91 | | | | | | 2155 |
| POL | AQPDKSESEL | 700 | 10 | 36 | 56 | | | | | | 2156 |
| POL | ELVNQIIEQL | 708 | 10 | 18 | 28 | | | | | | 2157 |
| POL | ELVSQIIEQL | 708 | 10 | 19 | 30 | | | | | | 2158 |
| POL | LVNQIIEQLI | 709 | 10 | 19 | 30 | | | | | | 2159 |
| POL | LVSQIIEQLI | 709 | 10 | 19 | 30 | | | | | | 2160 |
| POL | QLIKKEKVYL | 716 | 10 | 28 | 44 | 0.0006 | | | | | 2161 |
| POL | LIKKEKVYLA | 717 | 10 | 20 | 31 | | | | | | 2162 |
| POL | LAWVPAIIKGI | 725 | 10 | 22 | 34 | | | | | | 2163 |
| POL | QVDKLVSAGI | 739 | 10 | 15 | 23 | | | | | | 2164 |
| POL | QVDKLVSSGI | 739 | 10 | 29 | 45 | | | | | | 2165 |
| POL | KLVSAGIRKV | 742 | 10 | 15 | 23 | 0.0074 | | | | | 2166 |
| POL | KLVSSGIRKV | 742 | 10 | 26 | 41 | | | | | | 2167 |
| POL | LYSAGIRKYL | 743 | 10 | 15 | 23 | 0.0002 | | | | | 2168 |
| POL | LVSSGIRKVL | 743 | 10 | 26 | 41 | | | | | | 2169 |
| POL | SAGIRKVLFL | 745 | 10 | 15 | 23 | | | | | | 2170 |
| POL | VLFLDGIDKA | 751 | 10 | SI | 80 | 0.0007 | | | | | 2171 |
| POL | MASDINLPPI | 774 | 10 | 22 | 34 | | | | | | 2172 |
| POL | MASDFNLPPV | 774 | 10 | 25 | 39 | 0.0800 | 0.1900 | 0.1800 | 0.1100 | 2.200 | 2173 |
| POL | NLPPIVAKEI | 779 | 10 | 26 | 41 | | | | | | 2174 |
| POL | NLPPVVAKEI | 779 | 10 | 27 | 42 | 0.0007 | | | | | 2175 |
| POL | IVASCDKCQL | 788 | 10 | 43 | 67 | 0.0006 | | | | | 2176 |
| POL | GIWQLDCTHL | 811 | 10 | 59 | 92 | 0.0003 | | | | | 2177 |
| POL | CTHLEGKIIL | 817 | 10 | 31 | 48 | | | | | | 2178 |
| POL | CTIILEGKVIL | 817 | 10 | 23 | 36 | | | | | | 2179 |
| POL | IILEGKIILVA | 819 | 10 | 31 | 48 | | | | | | 2180 |
| POL | HLEGKVILVA | 819 | 10 | 23 | 36 | | | | | | 2181 |
| POL | KIILVAVHVA | 823 | 10 | 30 | 47 | | | | | | 2182 |
| POL | KVILVAVIIVA | 823 | 10 | 22 | 34 | | | | | | 2183 |
| POL | VAVIIVASGYI | 827 | 10 | 53 | 83 | | | | | | 2184 |
| POL | VASGYIEAEV | 831 | 10 | 52 | 81 | | | | | | 2185 |
| POL | VIPAETGQET | 840 | 10 | 58 | 91 | | | | | | 2186 |
| POL | ETGQETAYFI | 844 | 10 | 31 | 48 | | | | | | 2187 |
| POL | ETGQETAYFL | 844 | 10 | 26 | 41 | | | | | | 2188 |
| POL | ETAYFILKLA | 848 | 10 | 31 | 48 | | | | | | 2189 |
| POL | ETAYFLLKLA | 848 | 10 | 27 | 42 | | | | | | 2190 |
| POL | ILKLAGRWPV | 853 | 10 | 34 | 53 | | | | | | 2191 |
| POL | LLKLAGRWPV | 853 | 10 | 25 | 39 | 0.0004 | | | | | 2192 |
| POL | KLAGRWIPVKT | 855 | 10 | 14 | 22 | | | | | | 2193 |
| POL | KLAGRWPVKV | 855 | 10 | 30 | 47 | | | | | | 2194 |
| POL | LAGRWPVKTI | 856 | 10 | 13 | 20 | | | | | | 2195 |
| POL | LAGRWPVKVI | 856 | 10 | 22 | 34 | | | | | | 2196 |
| POL | AAVKAACWWA | 876 | 10 | 28 | 44 | | | | | | 2197 |
| POL | TTVKAACWWA | 876 | 10 | 14 | 22 | | | | | | 2198 |
| POL | WAGIKQEFGI | 884 | 10 | 21 | 33 | | | | | | 2199 |
| POL | WAGIQQEFGI | 884 | 10 | 11 | 17 | | | | | | 2200 |
| POL | PQSQGVVESM | 897 | 10 | 53 | 83 | | | | | | 2201 |
| POL | GVVESMNKEL | 901 | 10 | 48 | 75 | | | | | | 2202 |
| POL | SMNKELKKII | 905 | 10 | 53 | 83 | | | | | | 2203 |
| POL | KIIGQVRDQA | 912 | 10 | 43 | 67 | | | | | | 2204 |
| POL | KIIGQVREQA | 912 | 10 | 13 | 20 | | | | | | 2205 |
| POL | GQVRDQAEIIL | 915 | 10 | 44 | 69 | | | | | | 2206 |
| POL | GQVREQAEIIL | 915 | 10 | 13 | 20 | | | | | | 2207 |
| POL | DQAEIILKTAV | 919 | 10 | 46 | 72 | | | | | | 2208 |
| POL | EQAEIILKTAV | 919 | 10 | 13 | 20 | | | | | | 2209 |
| POL | IILKTAVQMAV | 923 | 10 | 57 | 89 | 0.0005 | | | | | 2210 |
| POL | KTAVQMAVFI | 925 | 10 | 56 | 88 | 0.0002 | | | | | 2211 |
| POL | SAGERIIDII | 947 | 10 | 41 | 64 | | | | | | 2212 |
| POL | SAGERIVDII | 947 | 10 | 14 | 22 | | | | | | 2213 |
| POL | RIIDIIASDI | 951 | 10 | 12 | 19 | | | | | | 2214 |
| POL | RIIDIIATDI | 951 | 10 | 29 | 45 | | | | | | 2215 |
| POL | RIVDIIATDI | 951 | 10 | 12 | 19 | | | | | | 2216 |
| POL | IASDIQTKEL | 956 | 10 | 14 | 22 | | | | | | 2217 |
| POL | IATDIQTKEL | 956 | 10 | 35 | 55 | | | | | | 2218 |
| POL | IQTKELQKQI | 960 | 10 | 44 | 69 | | | | | | 2219 |
| POL | QTKELQKQII | 961 | 10 | 10 | 16 | | | | | | 2220 |
| POL | QTKELQKQIT | 961 | 10 | 32 | 50 | | | | | | 2221 |
| POL | QIIKIQNFRV | 968 | 10 | 12 | 19 | | | | | | 2222 |
| POL | QITKIQNFRV | 968 | 10 | 35 | 55 | 0.0002 | | | | | 2223 |
| POL | PIWKGPAKLL | 985 | 10 | 35 | 55 | | | | | | 2224 |
| POL | PLWKGPAKLL | 985 | 10 | 18 | 28 | | | | | | 2225 |
| POL | KLLWKGEGAV | 992 | 10 | 60 | 94 | 0.0006 | | | | | 2226 |
| POL | LLWKGEGAVV | 993 | 10 | 61 | 95 | 0.0360 | | | | | 2227 |
| POL | AVVIQDNSDI | 1000 | 10 | 37 | 58 | | | | | | 2228 |
| POL | AVVIQDNSEI | 1000 | 10 | 12 | 19 | | | | | | 2229 |
| POL | VIQDNSEIKV | 1003 | 10 | 37 | 58 | 0.0013 | | | | | 2230 |
| POL | IQDNSDIKVV | 1003 | 10 | 12 | 19 | | | | | | 2231 |
| POL | IQDNSDIKVV | 1004 | 10 | 38 | 59 | | | | | | 2232 |
| POL | IQDNSEIKVV | 1004 | 10 | 12 | 19 | | | | | | 2233 |
| POL | DIKVVPRRKA | 1009 | 10 | 39 | 61 | | | | | | 2234 |
| POL | EIKVVPRRKA | 1009 | 10 | 13 | 20 | | | | | | 2235 |
| POL | KVVPRRKAKI | 1011 | 10 | 51 | 80 | | | | | | 2236 |
| POL | KVVPRRKVKI | 1011 | 10 | 11 | 17 | | | | | | 2237 |
| POL | VVPRRKAKII | 1012 | 10 | 50 | 78 | | | | | | 2238 |
| POL | VVPRRKVKII | 1012 | 10 | 11 | 17 | | | | | | 2239 |
| POL | KIIKDYGKQM | 1019 | 10 | 11 | 17 | | | | | | 2240 |
| POL | KIIRDYGKQM | 1019 | 10 | 50 | 78 | | | | | | 2241 |
| POL | IIKDYGKQMA | 1020 | 10 | 11 | 17 | | | | | | 2242 |
| POL | IIRDYGKQMA | 1020 | 10 | 49 | 77 | | | | | | 2243 |
| POL | KQMAGDDCVA | 1026 | 10 | 44 | 69 | | | | | | 2244 |
| POL | GAISLSLIPIT | 79 | 11 | 01 | 17 | | | | | | 2245 |
| POL | AISLSLPQITL | 80 | 11 | 01 | 33 | | | | | | 2246 |
| POL | PQITLWQRPLV | 88 | 11 | 47 | 73 | | | | | | 2247 |
| POL | QITLWQRPLVT | 89 | 11 | 37 | 58 | | | | | | 2248 |
| POL | ITLWQRPLVTI | 90 | 11 | 19 | 30 | | | | | | 2249 |
| POL | ITLWQRPLVTV | 90 | 11 | 18 | 28 | | | | | | 2250 |
| POL | PLVTIKIGGQL | 96 | 11 | 13 | 20 | | | | | | 2251 |
| POL | TIKIGGQLKEA | 99 | 11 | 17 | 27 | | | | | | 2252 |
| POL | KIGGQLKEALL | 101 | 11 | 23 | 36 | | | | | | 2253 |
| POL | QLIEALLDTGA | 105 | 11 | 10 | 16 | | | | | | 2254 |
| POL | QLKEAILDTGA | 105 | 11 | 34 | 53 | | | | | | 2255 |
| POL | EALLDTGADDT | 108 | 11 | 60 | 94 | | | | | | 2256 |
| POL | ALLDTGADDTV | 109 | 11 | 61 | 95 | | | | | | 2257 |
| POL | LLDTGADDTVL | 110 | 11 | 61 | 95 | | | | | | 2258 |
| POL | NLPGKWKPKMI | 124 | 11 | 35 | 55 | | | | | | 2259 |
| POL | MIGGIGGFIKY | 133 | 11 | 62 | 97 | | | | | | 2260 |
| POL | FIKVRQYDQIL | 140 | 11 | 21 | 33 | | | | | | 2261 |
| POL | QILIEICGKKA | 148 | 11 | 13 | 20 | | | | | | 2262 |
| POL | ILIEICGKKAI | 149 | 11 | 13 | 20 | | | | | | 2263 |
| POL | EICGIIKAIGTV | 152 | 11 | 19 | 30 | | | | | | 2264 |
| POL | EICGKKAIGTV | 152 | 11 | 23 | 36 | | | | | | 2265 |
| POL | KAIGTVLVGPT | 157 | 11 | 48 | 75 | | | | | | 2266 |
| POL | TVLVGPTPVNI | 161 | 11 | 53 | 83 | | | | | | 2267 |
| POL | VLVGPTPVNII | 162 | 11 | 51 | 80 | | | | | | 2268 |
| POL | PTPVNIIGRNL | 166 | 11 | 26 | 41 | | | | | | 2269 |
| POL | PTPVNIIGRNM | 166 | 11 | 24 | 38 | | | | | | 2270 |
| POL | PVNIIGRNLLT | 168 | 11 | 26 | 41 | | | | | | 2271 |
| POL | PVNIIGRNMLT | 168 | 11 | 23 | 36 | | | | | | 2272 |
| POL | NIIGRNLLTQI | 170 | 11 | 21 | 33 | | | | | | 2273 |
| POL | NIIGRNMLTQI | 170 | 11 | 18 | 28 | | | | | | 2274 |
| POL | NIIGRNMLTQL | 170 | 11 | 11 | 17 | | | | | | 2275 |
| POL | TQIGCTLNFPI | 178 | 11 | 41 | 64 | | | | | | 2276 |
| POL | TQLGCTLNFPI | 178 | 11 | 15 | 23 | | | | | | 2277 |
| POL | TLNFPISPIET | 183 | 11 | 54 | 86 | | | | | | 2278 |
| POL | ETVPVKLKPGM | 192 | 11 | 51 | 80 | | | | | | 2279 |
| POL | KLKPGMDGPKV | 197 | 11 | 47 | 73 | | | | | | 2280 |
| POL | PLTEEKIKALT | 212 | 11 | 35 | 55 | | | | | | 2281 |
| POL | PLTEEKIKALV | 212 | 11 | 15 | 23 | | | | | | 2282 |
| POL | EMEKEGKISKI | 229 | 11 | 32 | 50 | | | | | | 2283 |
| POL | PIFAIKKKDST | 248 | 11 | 22 | 34 | | | | | | 2284 |
| POL | PVFAIKKKDST | 248 | 11 | 37 | 58 | | | | | | 2285 |
| POL | LVDFRELNKRI | 263 | 11 | 60 | 94 | | | | | | 2286 |
| POL | TQDFWEVQLGI | 273 | 11 | 55 | 86 | | | | | | 2287 |
| POL | VQLGIPIPAGL | 279 | 11 | 54 | 84 | | | | | | 2288 |
| POL | PAGLKKKKSVT | 286 | 11 | 47 | 73 | | | | | | 2289 |
| POL | GLKKKKSVTVL | 288 | 11 | 49 | 77 | | | | | | 2290 |
| POL | VLDVGDAYFSV | 297 | 11 | 53 | 83 | 0.0150 | | | | | 2291 |
| POL | DVGDAYFSVPL | 299 | 11 | 54 | 84 | | | | | | 2292 |
| POL | PLDKDFRKVTA | 308 | 11 | 19 | 30 | | | | | | 2293 |
| POL | ETPGIRYQYNV | 327 | 11 | 51 | 80 | | | | | | 2294 |
| POL | VLPQGWKGSPA | 337 | 11 | 58 | 92 | | | | | | 2295 |
| POL | PAIFQSSMIKI | 346 | 11 | 36 | 56 | | | | | | 2296 |
| POL | AIFQSSMTKIL | 347 | 11 | 36 | 56 | | | | | | 2297 |
| POL | DIVIYQYMDDL | 366 | 11 | 18 | 28 | | | | | | 2298 |
| POL | EIVIYQYMDDL | 366 | 11 | 24 | 38 | | | | | | 2299 |
| POL | VIYQYMDDLYV | 368 | 11 | 51 | 80 | | | | | | 2300 |
| POL | YMDDLYVGSDL | 372 | 11 | 61 | 95 | | | | | | 2301 |
| POL | DLEIGQIIRAKI | 381 | 11 | 26 | 41 | | | | | | 2302 |
| POL | DLEIGQIIRTKI | 381 | 11 | 20 | 31 | | | | | | 2303 |
| POL | RAKIEELREIIL | 388 | 11 | 13 | 20 | | | | | | 2304 |
| POL | RTKIEELRQIIL | 388 | 11 | 14 | 22 | | | | | | 2305 |
| POL | RQIILLRWGFTT | 395 | 11 | 12 | 19 | | | | | | 2306 |
| POL | PIQLPEKDSWT | 432 | 11 | 13 | 20 | | | | | | 2307 |
| POL | PIVLPEKDSWT | 432 | 11 | 13 | 20 | | | | | | 2308 |
| POL | IQLPEKDSWTV | 433 | 11 | 13 | 20 | | | | | | 2309 |
| POL | IVLPEKDSWTV | 433 | 11 | 13 | 20 | | | | | | 2310 |
| POL | IQKLVGKLNWA | 446 | 11 | 61 | 95 | | | | | | 2311 |
| POL | LVGKLNWASQI | 449 | 11 | 60 | 94 | | | | | | 2312 |
| POL | WASQIYAGIKV | 455 | 11 | 26 | 41 | | | | | | 2313 |
| POL | WASQIYPGIKV | 455 | 11 | 27 | 42 | | | | | | 2314 |
| POL | QIYAGIKVKQL | 458 | 11 | 18 | 29 | | | | | | 2315 |
| POL | QIYPGIKVKQL | 458 | 11 | 11 | 17 | | | | | | 2316 |
| POL | QIYPGIKVRQL | 458 | 11 | 14 | 22 | | | | | | 2317 |
| POL | GIKVKQLCKLL | 462 | 11 | 27 | 42 | | | | | | 2318 |
| POL | GIKVRQLCKLL | 462 | 11 | 18 | 28 | | | | | | 2319 |
| POL | QLCKLLRGAKA | 467 | 11 | 24 | 38 | | | | | | 2320 |
| POL | QLCKLLRGTKA | 467 | 11 | 21 | 33 | | | | | | 2321 |
| POL | LLRGAKALTDI | 471 | 11 | 22 | 34 | | | | | | 2322 |
| POL | LLRGTKALTEV | 471 | 11 | 18 | 28 | | | | | | 2323 |
| POL | GAKALTDIVPL | 474 | 11 | 17 | 27 | | | | | | 2324 |
| POL | GTKALTEVIPL | 474 | 11 | 11 | 17 | | | | | | 2325 |
| POL | LTDIVPLTEEA | 478 | 11 | 13 | 20 | | | | | | 2326 |
| POL | LTEVIPLTEEA | 478 | 11 | 11 | 17 | | | | | | 2327 |
| POL | DIVPLTEEAEL | 480 | 11 | 13 | 20 | | | | | | 2328 |
| POL | EVIPLTEEAEL | 480 | 11 | 11 | 17 | | | | | | 2329 |
| POL | PLTEEAELELA | 483 | 11 | 29 | 45 | | | | | | 2330 |
| POL | ELELAENREIL | 489 | 11 | 53 | 83 | | | | | | 2331 |
| POL | GVYYDPSKDLI | 508 | 11 | 31 | 48 | | | | | | 2332 |
| POL | EIQKQGQDQWT | 520 | 11 | 12 | 19 | | | | | | 2333 |
| POL | EIQKQGQGQWT | 520 | 11 | 15 | 23 | | | | | | 2334 |
| POL | KQGQDQWTYQI | 523 | 11 | 13 | 20 | | | | | | 2335 |
| POL | KQGQGQWTYQI | 523 | 11 | 25 | 39 | | | | | | 2336 |
| POL | YQIYQEPFKNL | 531 | 11 | 40 | 63 | | | | | | 2337 |
| POL | KTGKYAKMRTA | 542 | 11 | 10 | 16 | | | | | | 2338 |
| POL | KTGKYARMRGA | 542 | 11 | 13 | 21 | | | | | | 2339 |
| POL | GAIITNDVKQLT | 551 | 11 | 18 | 28 | | | | | | 2340 |
| POL | SAHTNDVKQLT | 551 | 11 | 12 | 19 | | | | | | 2341 |
| POL | TAIITNDVKQLT | 551 | 11 | 00 | 16 | | | | | | 2342 |
| POL | IITNDVKQLTEA | 553 | 11 | 32 | 50 | | | | | | 2343 |
| POL | KQLTAVQKIA | 558 | 11 | 24 | 38 | | | | | | 2344 |
| POL | QLTEAVQKIAT | 559 | 11 | 11 | 17 | | | | | | 2345 |
| POL | EAVQKIATESI | 562 | 11 | 10 | 16 | | | | | | 2346 |
| POL | AVQKIATESIV | 563 | 11 | 10 | 16 | | | | | | 2347 |
| POL | VQKIATESIVI | 564 | 11 | 14 | 22 | | | | | | 2348 |
| POL | ATESIVIWGKT | 568 | 11 | 16 | 25 | | | | | | 2349 |
| POL | VIWGKTPKFKL | 573 | 11 | 17 | 27 | | | | | | 2350 |
| POL | VIWGKTPKFRL | 573 | 11 | 29 | 45 | | | | | | 2351 |
| POL | RLPIQKETWET | 582 | 11 | 18 | 28 | | | | | | 2352 |
| POL | IQKETWEAWWT | 585 | 11 | 11 | 17 | | | | | | 2353 |
| POL | IQKETWETWWT | 585 | 11 | 21 | 33 | | | | | | 2354 |
| POL | ETWWTDYWQAT | 591 | 11 | 10 | 16 | | | | | | 2355 |
| POL | QATWIPEWEFY | 599 | 11 | 51 | 81 | | | | | | 2356 |
| POL | KLWYQLEKDPI | 616 | 11 | 14 | 22 | | | | | | 2357 |
| POL | KLWYQLEKEPI | 616 | 11 | 31 | 48 | | | | | | 2358 |
| POL | KLWYQLETEPI | 616 | 11 | 11 | 17 | | | | | | 2359 |
| POL | YQLEKEPIVGA | 619 | 11 | 16 | 25 | | | | | | 2360 |
| POL | GAETFYVDGAA | 628 | 11 | 44 | 69 | | | | | | 2361 |
| POL | AANRETKLGKA | 637 | 11 | 30 | 47 | | | | | | 2362 |
| POL | ETKLGKAGYVT | 641 | 11 | 35 | 55 | | | | | | 2363 |
| POL | YVTDRGRQKVV | 649 | 11 | 27 | 42 | | | | | | 2364 |
| POL | RQKVVSLTETT | 655 | 11 | 10 | 16 | | | | | | 2365 |
| POL | LTDTTNQKTEL | 661 | 11 | 19 | 30 | | | | | | 2366 |
| POL | LTETTNQKTEL | 661 | 11 | 25 | 39 | | | | | | 2367 |
| POL | DTTNQKTELQA | 663 | 11 | 25 | 39 | | | | | | 2368 |
| POL | ETTNQKTELHA | 663 | 11 | 11 | 17 | | | | | | 2369 |
| POL | ETTNQKTELQA | 663 | 11 | 17 | 27 | | | | | | 2370 |
| POL | TTNQKTELHAI | 664 | 11 | 12 | 19 | | | | | | 2371 |
| POL | TTNQKTELQAI | 664 | 11 | 42 | 66 | | | | | | 2372 |
| POL | NQKTELQAIHL | 666 | 11 | 15 | 23 | | | | | | 2373 |
| POL | NQKTELQAIYL | 666 | 11 | 12 | 19 | | | | | | 2374 |
| POL | KTELQAIHLAL | 668 | 11 | 15 | 23 | | | | | | 2375 |
| POL | KTELQAIYLAL | 668 | 11 | 12 | 19 | | | | | | 2376 |
| POL | AIHLALQDSGL | 673 | 11 | 15 | 23 | | | | | | 2377 |
| POL | HLALQDSGLEV | 673 | 11 | 15 | 23 | | | | | | 2378 |
| POL | ALQDSGLLVNI | 677 | 11 | 27 | 42 | | | | | | 2379 |
| POL | ALQDSGSEVNI | 677 | 11 | 25 | 39 | | | | | | 2380 |
| POL | LQDSGLEVNIV | 678 | 11 | 27 | 42 | | | | | | 2381 |
| POL | LQDSGSEVNIV | 678 | 11 | 25 | 39 | | | | | | 2382 |
| POL | EVNIVTDSQYA | 684 | 11 | 59 | 92 | | | | | | 2383 |
| POL | IVTDSQYALGI | 687 | 11 | 58 | 91 | | | | | | 2384 |
| POL | VTDSQYALGII | 688 | 11 | 58 | 91 | | | | | | 2385 |
| POL | QAQPDKSESEL | 699 | 11 | 36 | 56 | | | | | | 2386 |
| POL | AQPDKSESELV | 700 | 11 | 36 | 56 | | | | | | 2387 |
| POL | ELVNQIIEQLI | 708 | 11 | 18 | 28 | | | | | | 2388 |
| POL | ELVSQIIEQLI | 708 | 11 | 19 | 30 | | | | | | 2389 |
| POL | IIEQLIKKEKV | 713 | 11 | 28 | 44 | | | | | | 2390 |
| POL | EQLIKKEKVYL | 715 | 11 | 28 | 44 | | | | | | 2391 |
| POL | QLIKKEKVYLA | 716 | 11 | 19 | 30 | | | | | | 2392 |
| POL | YLAWVPAIIKGI | 724 | 11 | 22 | 34 | | | | | | 2393 |
| POL | YLSWVPAIIKGI | 724 | 11 | 37 | 58 | | | | | | 2394 |
| POL | GIGGNEQVDKL | 733 | 11 | 58 | 91 | | | | | | 2395 |
| POL | EQVDKLVSAGI | 738 | 11 | 15 | 23 | | | | | | 2396 |
| POL | EQVDKLVSSGI | 738 | 11 | 29 | 45 | | | | | | 2397 |
| POL | KLVSAGIRKVL | 742 | 11 | 15 | 23 | | | | | | 2398 |
| POL | KLVSSGIRKVL | 742 | 11 | 26 | 41 | | | | | | 2399 |
| POL | GIRKVLFLDGI | 747 | 11 | 49 | 77 | | | | | | 2400 |
| POL | KVLFLDGIDKA | 750 | 11 | 48 | 75 | | | | | | 2401 |
| POL | AMASDFNLPPI | 773 | 11 | 18 | 28 | | | | | | 2402 |
| POL | AMASDFNLPPV | 773 | 11 | 25 | 39 | | | | | | 2403 |
| POL | MASDFNLPPIV | 774 | 11 | 20 | 31 | | | | | | 2404 |
| POL | MASDFNLPPVV | 774 | 11 | 25 | 39 | | | | | | 2405 |
| POL | NLPPIVAKEIV | 779 | 11 | 26 | 41 | | | | | | 2406 |
| POL | NLPPVVAKEIV | 779 | 11 | 27 | 42 | | | | | | 2407 |
| POL | EIVASCDKCQL | 787 | 11 | 43 | 67 | | | | | | 2408 |
| POL | QLKGEAMIIGQV | 796 | 11 | 53 | 83 | | | | | | 2409 |
| POL | QVDCSPGIWQL | 805 | 11 | 56 | 88 | | | | | | 2410 |
| POL | QLDCTHLEGKI | 814 | 11 | 33 | 52 | | | | | | 2411 |
| POL | QLDCTIILEGKV | 814 | 11 | 26 | 41 | | | | | | 2412 |
| POL | CTHLEGKIILV | 817 | 11 | 31 | 48 | | | | | | 2413 |
| POL | CTIILEGKVILV | 817 | 11 | 23 | 36 | | | | | | 2414 |
| POL | HLEGKIILVAV | 819 | 11 | 31 | 48 | | | | | | 2415 |
| POL | HLEGKVILVAV | 819 | 11 | 23 | 36 | | | | | | 2416 |
| POL | LVAVHVASGYI | 826 | 11 | 47 | 73 | | | | | | 2417 |
| POL | AVIIVASGYIEA | 828 | 11 | 52 | 81 | | | | | | 2418 |
| POL | HVASGYIEAEV | 830 | 11 | 52 | 81 | | | | | | 2419 |
| POL | VASGYIEAEVI | 831 | 11 | 52 | 81 | | | | | | 2420 |
| POL | YIEAEVIPAET | 835 | 11 | 53 | 83 | | | | | | 2421 |
| POL | EVIPAETGQET | 839 | 11 | 58 | 91 | | | | | | 2422 |
| POL | VIPAETGQETA | 840 | 11 | 58 | 91 | | | | | | 2423 |
| POL | ETGQETAYFIL | 844 | 11 | 31 | 48 | | | | | | 2424 |
| POL | ETGQETAYFLL | 844 | 11 | 26 | 41 | | | | | | 2425 |
| POL | GQETAYFILKL | 846 | 11 | 31 | 48 | | | | | | 2426 |
| POL | GQETAYFLLKL | 846 | 11 | 26 | 41 | | | | | | 2427 |
| POL | FILKLAGRWPV | 852 | 11 | 32 | 50 | | | | | | 2428 |
| POL | FLLKLAGRWPV | 852 | 11 | 25 | 39 | | | | | | 2429 |
| POL | KLAGRWPVKTI | 855 | 11 | 13 | 20 | | | | | | 2430 |
| POL | KLAGRWPVKVI | 855 | 11 | 22 | 34 | | | | | | 2431 |
| POL | TIIITDNGSNFT | 864 | 11 | 13 | 20 | | | | | | 2432 |
| POL | VIIITDNGSNFT | 864 | 11 | 23 | 36 | | | | | | 2433 |
| POL | IITDNGSNFTSA | 866 | 11 | 33 | 52 | | | | | | 2434 |
| POL | IITDNGSNFTST | 866 | 11 | 11 | 17 | | | | | | 2435 |
| POL | SAAVKAACWWA | 875 | 11 | 28 | 44 | | | | | | 2436 |
| POL | STTVKAACWWA | 875 | 11 | 14 | 22 | | | | | | 2437 |
| POL | AVKAACWWAGI | 877 | 11 | 10 | 16 | | | | | | 2438 |
| POL | TVKAACWWAGI | 877 | 11 | 20 | 31 | | | | | | 2439 |
| POL | GIPYNPQSQGV | 892 | 11 | 63 | 98 | | | | | | 2440 |
| POL | QVRDQAEIILKT | 916 | 11 | 43 | 67 | | | | | | 2441 |
| POL | QVREQAEIILKT | 916 | 11 | 13 | 20 | | | | | | 2442 |
| POL | QAEIILKTAVQM | 920 | 11 | 57 | 89 | | | | | | 2443 |
| POL | FIIINFKRKGGI | 933 | 11 | 58 | 91 | | | | | | 2444 |
| POL | GIGGYSAGERI | 942 | 11 | 57 | 89 | | | | | | 2445 |
| POL | SAGERIIDIIA | 947 | 11 | 40 | 63 | | | | | | 2446 |
| POL | SAGERIVDIIA | 947 | 11 | 14 | 22 | | | | | | 2447 |
| POL | IIDIASDIQT | 952 | 11 | 12 | 19 | | | | | | 2448 |
| POL | IIDIIATDIQT | 952 | 11 | 27 | 42 | | | | | | 2449 |
| POL | IVDIIATDIQT | 952 | 11 | 12 | 19 | | | | | | 2450 |
| POL | IIASDIQTKEL | 955 | 11 | 14 | 22 | | | | | | 2451 |
| POL | IIATDIQTKEL | 955 | 11 | 34 | 53 | | | | | | 2452 |
| POL | DIQTKLLQKQI | 959 | 11 | 44 | 69 | | | | | | 2453 |
| POL | IQTKELQKQII | 960 | 11 | 10 | 16 | | | | | | 2454 |
| POL | IQTKELQKQIT | 960 | 11 | 30 | 47 | | | | | | 2455 |
| POL | KQIIKIQNFRV | 967 | 11 | 12 | 19 | | | | | | 2456 |
| POL | KQITKIQNFRV | 967 | 11 | 34 | 54 | | | | | | 2457 |
| POL | RVYYRDSRDPI | 976 | 11 | 34 | 53 | | | | | | 2458 |
| POL | RVYYRDSRDPL | 976 | 11 | 14 | 22 | | | | | | 2459 |
| POL | PAKLLWKGEGA | 990 | 11 | 59 | 92 | | | | | | 2460 |
| POL | KLLWKGEGAVV | 992 | 11 | 59 | 92 | | | | | | 2461 |
| POL | LLWKGEGAVVI | 993 | 11 | 59 | 92 | | | | | | 2462 |
| POL | GAVVIQDNSDI | 999 | 11 | 37 | 58 | | | | | | 2463 |
| POL | GAVVIQDNSEI | 999 | 11 | 12 | 19 | | | | | | 2464 |
| POL | VVIQDNSDIKV | 1002 | 11 | 37 | 58 | | | | | | 2465 |
| POL | VVIQDNSEIKV | 1002 | 11 | 12 | 19 | | | | | | 2466 |
| POL | VIQDNSDIKVV | 1003 | 11 | 37 | 58 | | | | | | 2467 |
| POL | VIQDNSEIKVV | 1003 | 11 | 12 | 19 | | | | | | 2468 |
| POL | KVVPRRKAKII | 1011 | 11 | 50 | 78 | | | | | | 2469 |
| POL | KVVPRRKVKII | 1011 | 11 | 11 | 17 | | | | | | 2470 |
| POL | KIIKDYGKQMA | 1019 | 11 | 11 | 17 | | | | | | 2471 |
| POL | KIIRDYGKQMA | 1019 | 11 | 49 | 77 | | | | | | 2472 |
| REV | LLKTVRLI | 12 | 8 | 11 | 17 | | | | | | 2473 |
| REV | AVRIIKIL | 17 | 8 | 13 | 20 | | | | | | 2474 |
| REV | RQRQIHSI | 52 | 8 | 11 | 17 | | | | | | 2475 |
| REV | QLPPIERL | 78 | 8 | 14 | 22 | | | | | | 2476 |
| REV | QLPPLERL | 78 | 8 | 37 | 58 | | | | | | 2477 |
| REV | GTSGTQGV | 94 | 8 | 21 | 33 | | | | | | 2478 |
| REV | GTQQSQGT | 97 | 8 | 10 | 16 | | | | | | 2479 |
| REV | PQGTETGV | 101 | 8 | 05 | 18 | | | | | | 2480 |
| REV | SQGTETGV | 101 | 8 | 05 | 18 | | | | | | 2481 |
| REV | LVESPAVL | 114 | 8 | 11 | 17 | | | | | | 2482 |
| REV | SISERILST | 58 | 9 | 10 | 16 | | | | | | 2483 |
| REV | CLGRPAEPV | 67 | 9 | 10 | 16 | | | | | | 2484 |
| REV | PAEPVPLQL | 71 | 9 | 21 | 33 | | | | | | 2485 |
| REV | SAEPVPLQL | 71 | 9 | 12 | 19 | | | | | | 2486 |
| REV | PVPLQLPPI | 74 | 9 | 11 | 17 | | | | | | 2487 |
| REV | PVPLQLPPL | 74 | 9 | 35 | 55 | | | | | | 2488 |
| REV | LQLPPIERL | 77 | 9 | 11 | 17 | | | | | | 2489 |
| REV | LQLPPLERL | 77 | 9 | 36 | 56 | | | | | | 2490 |
| REV | QLPPLERLT | 78 | 9 | 18 | 28 | | | | | | 2491 |
| REV | TQGVGSPQI | 98 | 9 | 11 | 18 | | | | | | 2492 |
| REV | RARQRQIIISI | 50 | 10 | 10 | 16 | | | | | | 2493 |
| REV | PLQLPPIERL | 76 | 10 | 11 | 17 | | | | | | 2494 |
| REV | PLQLPPLERL | 76 | 10 | 34 | 53 | | | | | | 2495 |
| REV | LQLPPLERLT | 77 | 10 | 17 | 27 | | | | | | 2496 |
| REV | QLPPLERLTL | 78 | 10 | 18 | 28 | 0.0001 | | | | | 2497 |
| REV | GTQGVGSPQI | 97 | 10 | 11 | 18 | | | | | | 2498 |
| REV | PLQLPPLERLT | 76 | 11 | 15 | 23 | | | | | | 2499 |
| REV | LQLPPLERLTL | 77 | 11 | 17 | 27 | | | | | | 2500 |
| REV | GTSGTQQSQGT | 94 | 11 | 10 | 16 | | | | | | 2501 |
| TAT | SQPKTACT | 19 | 8 | 13 | 20 | | | | | | 2502 |
| TAT | FLNKGLGI | 41 | 8 | 14 | 22 | | | | | | 2503 |
| TAT | SQPRGDPT | 80 | 8 | 13 | 20 | | | | | | 2504 |
| TAT | KVERETET | 97 | 8 | 12 | 19 | | | | | | 2505 |
| TAT | PTGPKESKKKV | 88 | 11 | 12 | 19 | | | | | | 2506 |
| VIF | QVMIVWQV | 6 | 8 | 43 | 67 | | | | | | 2507 |
| VIF | IVWQVDRM | 9 | 8 | 59 | 92 | | | | | | 2508 |
| VIF | WQVDRMKI | 11 | 8 | 13 | 20 | | | | | | 2509 |
| VIF | WQVDRMRI | 11 | 8 | 48 | 75 | | | | | | 2510 |
| VIF | KIRTWNSL | 17 | 8 | 12 | 19 | | | | | | 2511 |
| VIF | RIRTWKSL | 17 | 8 | 15 | 23 | | | | | | 2512 |
| VIF | RIRTWNSL | 17 | 8 | 15 | 23 | | | | | | 2513 |
| VIF | LVKIIIIMYI | 24 | 8 | 19 | 30 | | | | | | 2514 |
| VIF | LVKIIIIMYV | 24 | 8 | 21 | 33 | | | | | | 2515 |
| VIF | IIMYVSKKA | 28 | 8 | 13 | 20 | | | | | | 2516 |
| VIF | KISSEVIII | 50 | 8 | 15 | 23 | | | | | | 2517 |
| VIF | KVSSEVIII | 50 | 8 | 20 | 31 | | | | | | 2518 |
| VIF | RISSEVIII | 50 | 8 | 15 | 23 | | | | | | 2519 |
| VIF | PLGDARLV | 58 | 8 | 11 | 17 | | | | | | 2520 |
| VIF | PLGEARLV | 58 | 8 | 19 | 30 | | | | | | 2521 |
| VIF | VIKTYWGL | 67 | 8 | 10 | 16 | | | | | | 2522 |
| VIF | VITTYWGL | 67 | 8 | 22 | 34 | | | | | | 2523 |
| VIF | VVRTYWGL | 67 | 8 | 10 | 16 | | | | | | 2524 |
| VIF | VVTTYWGL | 67 | 8 | 11 | 17 | | | | | | 2525 |
| VIF | TTYWGLHT | 69 | 8 | 24 | 38 | | | | | | 2526 |
| VIF | HLGHGVSI | 83 | 8 | 25 | 39 | | | | | | 2527 |
| VIF | HLGQGVSI | 83 | 8 | 26 | 41 | | | | | | 2528 |
| VIF | GVSIEWRL | 87 | 8 | 18 | 28 | | | | | | 2529 |
| VIF | STQIDPDL | 100 | 8 | 12 | 19 | | | | | | 2530 |
| VIF | STQVDPGL | 100 | 8 | 11 | 17 | | | | | | 2531 |
| VIF | TQIDPDLA | 101 | 8 | 12 | 19 | | | | | | 2532 |
| VIF | TQVDPDLA | 101 | 8 | 11 | 17 | | | | | | 2533 |
| VIF | TQVDPGLA | 101 | 8 | 16 | 25 | | | | | | 2534 |
| VIF | LADQLIIIL | 107 | 8 | 25 | 39 | | | | | | 2535 |
| VIF | LADQLIIIM | 107 | 8 | 17 | 27 | | | | | | 2536 |
| VIF | SAIRKAIL | 123 | 8 | 35 | 55 | | | | | | 2537 |
| VIF | SAIRNAIL | 123 | 8 | 12 | 19 | | | | | | 2538 |
| VIF | YQAGHNKV | 140 | 8 | 38 | 59 | | | | | | 2539 |
| VIF | KVGSLQYL | 146 | 8 | 52 | 81 | | | | | | 2540 |
| VIF | SLQYLALA | 149 | 8 | 12 | 19 | | | | | | 2541 |
| VIF | SLQYLALT | 149 | 8 | 31 | 48 | | | | | | 2542 |
| VIF | LQYLALAA | 150 | 8 | 12 | 19 | | | | | | 2543 |
| VIF | LQYIALKA | 150 | 8 | 11 | 17 | | | | | | 2544 |
| VIF | LQYLALTA | 150 | 8 | 34 | 53 | | | | | | 2545 |
| VIF | YLALIALI | 152 | 8 | 28 | 44 | | | | | | 2546 |
| VIF | ALIKPKKI | 157 | 8 | 10 | 16 | | | | | | 2547 |
| VIF | PLPSVKKL | 168 | 8 | 21 | 33 | | | | | | 2548 |
| VIF | PLPSVRKL | 168 | 8 | 14 | 22 | | | | | | 2549 |
| VIF | WQVMIVWQV | 5 | 9 | 43 | 67 | | | | | | 2550 |
| VIF | MIVWQVDRM | 8 | 9 | 46 | 72 | | | | | | 2551 |
| VIF | QVDRMKIRT | 12 | 9 | 12 | 19 | | | | | | 2552 |
| VIF | QVDRMRINT | 12 | 9 | 10 | 16 | | | | | | 2553 |
| VIF | QVDRMRIRT | 12 | 9 | 31 | 48 | | | | | | 2554 |
| VIF | KIRIWNSLV | 17 | 9 | 12 | 19 | | | | | | 2555 |
| VIF | RIRTWKSLV | 17 | 9 | 15 | 23 | | | | | | 2556 |
| VIF | RIRTWNSLV | 17 | 9 | 15 | 23 | | | | | | 2557 |
| VIF | SLVKIIIIMYI | 23 | 9 | 19 | 30 | | | | | | 2558 |
| VIF | SLVKIIIIMYV | 23 | 9 | 21 | 33 | | | | | | 2559 |
| VIF | EVIIIFLGDA | 54 | 9 | 24 | 38 | | | | | | 2560 |
| VIF | EVHIPLGEA | 54 | 9 | 25 | 39 | | | | | | 2561 |
| VIF | HIPLCDARL | 56 | 9 | 13 | 20 | | | | | | 2562 |
| VIF | IIIPLGEARL | 56 | 9 | 20 | 31 | | | | | | 2563 |
| VIF | PLGEARLVI | 58 | 9 | 10 | 16 | | | | | | 2564 |
| VIF | LVIKTYWGL | 66 | 9 | 10 | 16 | | | | | | 2565 |
| VIF | LVITFYWGL | 66 | 9 | 22 | 34 | 0.0031 | | | | | 2566 |
| VIF | ITTYWGLIIT | 68 | 9 | 16 | 25 | | | | | | 2567 |
| VIF | IITGERDWHL | 75 | 9 | 21 | 33 | | | | | | 2568 |
| VIF | QTGERDWIIL | 75 | 9 | 12 | 19 | | | | | | 2569 |
| VIF | STQIDPDLA | 100 | 9 | 12 | 19 | | | | | | 2570 |
| VIF | STQVDPGLA | 100 | 9 | 11 | 17 | | | | | | 2571 |
| VIF | DLADQLIHL | 106 | 9 | 18 | 28 | | | | | | 2572 |
| VIF | GLADQLIHM | 106 | 9 | 15 | 23 | | | | | | 2573 |
| VIF | KVGSLQYLA | 146 | 9 | 52 | 81 | | | | | | 2574 |
| VIF | SLQYLALAA | 149 | 9 | 12 | 19 | | | | | | 2575 |
| VIF | SLQYLALKA | 149 | 9 | 11 | 17 | | | | | | 2576 |
| VIF | SLQYLALTA | 149 | 9 | 31 | 48 | | | | | | 2577 |
| VIF | LQYLALAAL | 150 | 9 | 12 | 19 | | | | | | 2578 |
| VIF | LQYLALKAL | 150 | 9 | 11 | 17 | | | | | | 2579 |
| VIF | LQYLALTAL | 150 | 9 | 33 | 52 | | | | | | 2580 |
| VIF | KIKPPLPSV | 164 | 9 | 19 | 30 | | | | | | 2581 |
| VIF | KTKPPLPSV | 164 | 9 | 12 | 19 | | | | | | 2582 |
| VIF | PLPSVKKLT | 168 | 9 | 13 | 20 | | | | | | 2583 |
| VIF | VMIVWQVDRM | 7 | 10 | 44 | 69 | | | | | | 2584 |
| VIF | IVWQVDRMKI | 9 | 10 | 12 | 19 | | | | | | 2585 |
| VIF | IVWQVDRMRI | 9 | 10 | 47 | 73 | | | | | | 2586 |
| VIF | WQVDRMKIRT | 11 | 10 | 12 | 19 | | | | | | 2587 |
| VIF | WQVDRMRINT | 11 | 10 | 10 | 16 | | | | | | 2588 |
| VIF | WQVDRMRIRT | 11 | 10 | 31 | 48 | | | | | | 2589 |
| VIF | RMKIRFWNSL | 15 | 10 | 12 | 19 | | | | | | 2590 |
| VIF | RMRIRTWKSL | 15 | 10 | 15 | 23 | | | | | | 2591 |
| VIF | KMRIRTWNSL | 15 | 10 | 15 | 23 | | | | | | 2592 |
| VIF | KISSEVHIPL | 50 | 10 | 14 | 22 | | | | | | 2593 |
| VIF | KVSSPVIIIPL | 50 | 10 | 19 | 30 | | | | | | 2594 |
| VIF | RISSEVIIIPL | 50 | 10 | 13 | 20 | | | | | | 2595 |
| VIF | IIIPLGDARLV | 56 | 10 | 10 | 16 | | | | | | 2596 |
| VIF | IIIPLGEARLV | 56 | 10 | 19 | 30 | | | | | | 2597 |
| VIF | RLVITTYWGL | 65 | 10 | 12 | 19 | | | | | | 2598 |
| VIF | VITTYWGLIIT | 67 | 10 | 16 | 25 | | | | | | 2599 |
| VIF | LQTGERDWIIL | 74 | 10 | 12 | 19 | | | | | | 2600 |
| VIF | QIDPDLADQL | 102 | 10 | 10 | 16 | | | | | | 2601 |
| VIF | QVDPGLADQL | 102 | 10 | 14 | 22 | | | | | | 2602 |
| VIF | IVSPRCEYQA | 133 | 10 | 11 | 17 | | | | | | 2603 |
| VIF | QAGIINKVGSL | 141 | 10 | 38 | 59 | | | | | | 2604 |
| VIF | KVGSLQYLAL | 146 | 10 | 51 | 80 | 0.0008 | | | | | 2605 |
| VIF | SLQYLALAAL | 149 | 10 | 12 | 19 | | | | | | 2606 |
| VIF | SLQYLALKAL | 149 | 10 | 11 | 17 | | | | | | 2607 |
| VIF | SLQYLALTAL | 149 | 10 | 31 | 48 | | | | | | 2608 |
| VIF | LQYLALTALI | 150 | 10 | 28 | 44 | | | | | | 2609 |
| VIF | KTKGHRGSHT | 188 | 10 | 16 | 25 | | | | | | 2610 |
| VIF | QVMIVWQVDRM | 6 | 11 | 43 | 67 | | | | | | 2611 |
| VIF | MIVWQVDRMRI | 8 | 11 | 43 | 67 | | | | | | 2612 |
| VIF | RMKIRTWNSLV | 15 | 11 | 12 | 19 | | | | | | 2613 |
| VIF | RMRIRTWKSLV | 15 | 11 | 15 | 23 | | | | | | 2614 |
| VIF | RMRIRTWNSLV | 15 | 11 | 15 | 23 | | | | | | 2615 |
| VIF | RTWKSLVKIIIIM | 19 | 11 | 14 | 22 | | | | | | 2616 |
| VIF | RTWNSLVKIIHM | 19 | 11 | 24 | 38 | | | | | | 2617 |
| VIF | EVHIPLGDARL | 54 | 11 | 13 | 20 | | | | | | 2618 |
| VIF | EVHIPLGEARL | 54 | 11 | 20 | 31 | | | | | | 2619 |
| VIF | HIPLGEARLVI | 56 | 11 | 10 | 16 | | | | | | 2620 |
| VIF | LVITTYWGLHT | 66 | 11 | 16 | 25 | | | | | | 2621 |
| VIF | GLHTGERDWHL | 73 | 11 | 21 | 33 | | | | | | 2622 |
| VIF | GLQTGERDWHL | 73 | 11 | 12 | 19 | | | | | | 2623 |
| VIF | TQIDPDLADQL | 101 | 11 | 10 | 16 | | | | | | 2624 |
| VIF | TQVDPGLADQL | 101 | 11 | 13 | 20 | | | | | | 2625 |
| VIF | QIDPDLADQLI | 102 | 11 | 10 | 16 | | | | | | 2626 |
| VIF | QVDPGLADQLI | 102 | 11 | 14 | 22 | | | | | | 2627 |
| VIF | YQAGHNKVGSL | 140 | 11 | 38 | 59 | | | | | | 2628 |
| VIF | KVGSLQYLALA | 146 | 11 | 12 | 19 | | | | | | 2629 |
| VIF | KVGSLQYLALT | 146 | 11 | 28 | 44 | | | | | | 2630 |
| VIF | SLQYLALTALI | 149 | 11 | 27 | 42 | | | | | | 2631 |
| VIF | LIKPKKIKPPL | 158 | 11 | 10 | 16 | | | | | | 2632 |
| VIF | KTKGFIRGSIITM | 188 | 11 | 15 | 23 | | | | | | 2633 |
| VPR | ALELLEEL | 19 | 8 | 10 | 16 | | | | | | 2634 |
| VPR | TLELLEEL | 19 | 8 | 44 | 69 | | | | | | 2635 |
| VPR | AVRIIFPRI | 30 | 8 | 14 | 22 | | | | | | 2636 |
| VPR | ETYGDTWA | 48 | 8 | 16 | 25 | | | | | | 2637 |
| VPR | ETYGDTWT | 48 | 8 | 11 | 17 | | | | | | 2638 |
| VPR | DTWAGVEA | 52 | 8 | 16 | 25 | | | | | | 2639 |
| VPR | DTWEGVEA | 52 | 8 | 23 | 36 | | | | | | 2640 |
| VPR | WAGVEAII | 54 | 8 | 16 | 25 | | | | | | 2641 |
| VPR | GVEAIIRI | 56 | 8 | 34 | 53 | | | | | | 2642 |
| VPR | IIRILQQL | 60 | 8 | 42 | 66 | | | | | | 2643 |
| VPR | ILQQLLFI | 63 | 8 | 37 | 58 | | | | | | 2644 |
| VPR | LLFIHFRI | 67 | 8 | 44 | 69 | | | | | | 2645 |
| VPR | LLFVIIFRI | 67 | 8 | 12 | 19 | | | | | | 2646 |
| VPR | CQIISRIGI | 77 | 8 | 45 | 70 | | | | | | 2647 |
| VPR | WALELLEEL | 18 | 9 | 09 | 15 | | | | | | 2648 |
| VPR | WTLELLEEL | 18 | 9 | 42 | 69 | 0.0035 | | | | | 2649 |
| VPR | LLEELKNEA | 22 | 9 | 17 | 27 | | | | | | 2650 |
| VPR | LLEELKSEA | 22 | 9 | 16 | 25 | | | | | | 2651 |
| VPR | EAVRHFPRI | 29 | 9 | 14 | 22 | 0.0001 | | | | | 2652 |
| VPR | WLHGLGQHI | 38 | 9 | 20 | 31 | | | | | | 2653 |
| VPR | HIYETYGDT | 45 | 9 | 17 | 27 | | | | | | 2654 |
| VPR | IIIYNTYGDT | 45 | 9 | 14 | 22 | | | | | | 2655 |
| VPR | YIYETYGDT | 45 | 9 | 14 | 22 | | | | | | 2656 |
| VPR | DTWAGVEAI | 52 | 9 | 16 | 25 | | | | | | 2657 |
| VPR | DTWEGVEAI | 52 | 9 | 20 | 31 | | | | | | 2658 |
| VPR | GVEAIIRIL | 56 | 9 | 34 | 53 | | | | | | 2659 |
| VPR | AIIRILQQL | 59 | 9 | 39 | 61 | 0.0150 | 0.1900 | 0.2400 | 0.0960 | 0.0730 | 2660 |
| VPR | IIRILQQLL | 60 | 9 | 42 | 66 | 0.0004 | | | | | 2661 |
| VPR | RILQQLLFI | 62 | 9 | 36 | 56 | 0.2600 | 0.0028 | 0.0800 | 0.1000 | 0.0220 | 2662 |
| VPR | QLLFIIIFRI | 66 | 9 | 44 | 69 | 0.0530 | 0.0002 | 0.0004 | 0.0023 | 0.0840 | 2663 |
| VPR | QLLFVHFRI | 66 | 9 | 10 | 16 | | | | | | 2664 |
| VPR | RIGCQHSRI | 74 | 9 | 47 | 73 | | | | | | 2665 |
| VPR | RIGCRIISRI | 74 | 9 | 12 | 19 | | | | | | 2666 |
| VPR | CQHSRIGII | 77 | 9 | 16 | 25 | | | | | | 2667 |
| VPR | CQHSRIGIT | 77 | 9 | 14 | 22 | | | | | | 2668 |
| VPR | RQRRARNGA | 90 | 9 | 13 | 20 | | | | | | 2669 |
| VPR | PQREPYNEWT | 10 | 10 | 29 | 45 | | | | | | 2670 |
| VPR | ELLEELKNEA | 21 | 10 | 16 | 25 | | | | | | 2671 |
| VPR | ELLEELKSEA | 21 | 10 | 16 | 25 | | | | | | 2672 |
| VPR | LLEELKNEAV | 22 | 10 | 17 | 27 | | | | | | 2673 |
| VPR | LLEELKSEAV | 22 | 10 | 16 | 25 | | | | | | 2674 |
| VPR | AVRHFPRIWL | 30 | 10 | 14 | 22 | 0.0002 | | | | | 2675 |
| VPR | AVRHFPRPWL | 30 | 10 | 34 | S3 | | | | | | 2676 |
| VPR | ETYGDTWAGV | 48 | 10 | 16 | 25 | 0.0009 | | | | | 2677 |
| VPR | ETYGDTWTGV | 48 | 10 | 11 | 17 | | | | | | 2678 |
| VPR | NTYGDTWEGV | 48 | 10 | 16 | 25 | | | | | | 2679 |
| VPR | DTWAGVEAII | 52 | 10 | 16 | 25 | | | | | | 2680 |
| VPR | DTWEGVEAII | 52 | 10 | 19 | 30 | | | | | | 2681 |
| VPR | WAGVEAIIRI | 54 | 10 | 15 | 23 | | | | | | 2682 |
| VPR | EAIIRILQQL | 58 | 10 | 33 | 52 | | | | | | 2683 |
| VPR | AIIRILQQLL | 59 | 10 | 39 | 61 | 0.0014 | | | | | 2684 |
| VPR | QQLLFIHFRI | 65 | 10 | 44 | 69 | | | | | | 2685 |
| VPR | QQLLFVIIFRI | 65 | 10 | 10 | 16 | | | | | | 2686 |
| VPR | PQREPYNEWTL | 10 | 11 | 29 | 45 | | | | | | 2687 |
| VPR | ELLEELKNEAV | 21 | 11 | 16 | 25 | | | | | | 2688 |
| VPR | ELLEELKSEAV | 21 | 11 | 16 | 25 | | | | | | 2689 |
| VPR | EAVRHIPRIWL | 29 | 11 | 14 | 22 | | | | | | 2690 |
| VPR | EAVRHFPRPWL | 29 | 11 | 34 | 53 | | | | | | 2691 |
| VPR | GQHIYETYGDT | 43 | 11 | 17 | 27 | | | | | | 2692 |
| VPR | GQIIIYNTYGDT | 43 | 11 | 13 | 20 | | | | | | 2693 |
| VPR | GQYIYETYGDT | 43 | 11 | 13 | 20 | | | | | | 2694 |
| VPR | WAGVEAIIRIL | 54 | 11 | 15 | 23 | | | | | | 2695 |
| VPR | EAIIRILQQLL | 58 | 11 | 33 | 52 | | | | | | 2696 |
| VPR | IIRILQQLLFI | 60 | 11 | 33 | 52 | | | | | | 2697 |
| VPR | LQQLLFIIIFRI | 64 | 11 | 44 | 69 | | | | | | 2698 |
| VPR | LQQLLFVIIPRI | 64 | 11 | 10 | 16 | | | | | | 2699 |
| VPR | RIGCQHSRIGI | 74 | 11 | 45 | 70 | | | | | | 2700 |
| VPR | RIGCRIISRIGI | 74 | 11 | 11 | 17 | | | | | | 2701 |
| VPR | #LPGRRGRNGA | 85 | 11 | 01 | 50 | | | | | | 2702 |
| VPU | LAKVDYRI | 5 | 8 | 01 | 25 | | | | | | 2703 |
| VPU | LAKVDYRL | 5 | 8 | 01 | 25 | | | | | | 2704 |
| VPU | KVDYRIVI | 7 | 8 | 01 | 33 | | | | | | 2705 |
| VPU | KVDYRLGV | 7 | 8 | 01 | 33 | | | | | | 2706 |
| VPU | RIDYRLGV | 7 | 8 | 01 | 33 | | | | | | 2707 |
| VPU | ILAIVALY | 12 | 8 | 12 | 19 | | | | | | 2708 |
| VPU | LAIVALVV | 13 | 8 | 12 | 20 | | | | | | 2709 |
| VPU | AIVALVVA | 14 | 8 | 12 | 19 | | | | | | 2710 |
| VPU | IIAIVVWT | 27 | 8 | 23 | 36 | | | | | | 2711 |
| VPU | IAIVVWTI | 28 | 8 | 23 | 36 | | | | | | 2712 |
| VPU | AIVVWTTV | 29 | 8 | 29 | 45 | | | | | | 2713 |
| VPU | VVWTIVFI | 31 | 8 | 15 | 23 | | | | | | 2714 |
| VPU | KILRQRKI | 45 | 8 | 15 | 23 | | | | | | 2715 |
| VPU | RQRKIDRL | 48 | 8 | 20 | 31 | | | | | | 2716 |
| VPU | DQEELSAL | 79 | 8 | 13 | 22 | | | | | | 2717 |
| VPU | GVEMGHHA | 91 | 8 | 01 | 50 | | | | | | 2718 |
| VPU | LAKVDYRIV | 5 | 9 | 01 | 25 | | | | | | 2719 |
| VPU | KVDYRIVIV | 7 | 9 | 01 | 33 | | | | | | 2720 |
| VPU | ILAIVALVV | 12 | 9 | 11 | 17 | | | | | | 2721 |
| VPU | LAIVALVVA | 13 | 9 | 09 | 15 | | | | | | 2722 |
| VPU | IIAIVVWTI | 27 | 9 | 23 | 36 | | | | | | 2723 |
| VPU | IAIVVWTIV | 28 | 9 | 20 | 31 | | | | | | 2724 |
| VPU | IVVWTIVFI | 30 | 9 | 15 | 23 | | | | | | 2725 |
| VPU | IVFIEYRKI | 36 | 9 | 12 | 19 | | | | | | 2726 |
| VPU | RQRKIDRLI | 48 | 9 | 17 | 27 | | | | | | 2727 |
| VPU | KIDRLIDRI | 52 | 9 | 14 | 22 | | | | | | 2728 |
| VPU | LIDRIRERA | 58 | 9 | 12 | 19 | | | | | | 2729 |
| VPU | DQEELSALV | 79 | 9 | 11 | 18 | | | | | | 2730 |
| VPU | VTLLSSSKL | 94 | 9 | 01 | 50 | | | | | | 2731 |
| VPU | LAKVDYRIVI | 5 | 10 | 01 | 25 | | | | | | 2732 |
| VPU | LAKVDYRLGV | 5 | 10 | 01 | 25 | | | | | | 2733 |
| VPU | KVDYRIVIVA | 7 | 10 | 01 | 33 | | | | | | 2734 |
| VPU | KVDYRLGVGA | 7 | 10 | 01 | 33 | | | | | | 2735 |
| VPU | RIDYRLGVGA | 7 | 10 | 01 | 33 | | | | | | 2736 |
| VPU | IIAIVVWTIV | 27 | 10 | 20 | 31 | | | | | | 2737 |
| VPU | AIVVWTIVFI | 29 | 10 | 14 | 22 | | | | | | 2738 |
| VPU | ILRQRKIDRL | 46 | 10 | 15 | 23 | | | | | | 2739 |
| VPU | LVTLLSSSKL | 91 | 10 | 01 | 50 | | | | | | 2740 |
| VPU | LAKVDYRIVIV | 5 | 11 | 01 | 25 | | | | | | 2741 |
| VPU | KVDYRLGVGAL | 7 | 11 | 01 | 33 | | | | | | 2742 |
| VPU | RIDYRLGVGAL | 7 | 11 | 01 | 33 | | | | | | 2743 |
| VPU | KILRQRKIDRL | 45 | 11 | 15 | 23 | | | | | | 2744 |
| VPU | ILRQRKIDRLI | 46 | 11 | 13 | 20 | | | | | | 2745 |

[0389] TABLE IX
HIV A03 Super Motif Peptides with Binding lnformation

| | | | | | | | | | | | |
|---|---|---|---|---|---|---|---|---|---|---|---|
| | | | No. | Se- | Con- | | | | | | |
| | | | of | quence | serv- | | | | | | |
| Pro- | | Posi- | Amino | Fre- | ancy | | | | | | SEQ |
| tein | Sequence | tion | Acids | quency | (%) | A*0301 | A*1101 | A*3101 | A*3301 | A*6801 | ID NO |

| | | | | | | | | | | | |
|---|---|---|---|---|---|---|---|---|---|---|---|
| ENV | SLWDQSLK | 123 | 8 | 47 | 75 | | | | | | 2746 |
| ENV | QSLKPCVK | 127 | 8 | 48 | 75 | | | | | | 2747 |
| ENV | AITQACPK | 244 | 8 | 14 | 22 | | | | | | 2748 |
| ENV | TITQACPK | 244 | 8 | 11 | 17 | | | | | | 2749 |
| ENV | VITQACPK | 244 | 8 | 17 | 27 | | | | | | 2750 |
| ENV | PAGFAILK | 266 | 8 | 38 | 59 | | | | | | 2751 |
| ENV | PAGYAILK | 266 | 8 | 15 | 23 | | | | | | 2752 |
| ENV | AILKCNDK | 270 | 8 | 20 | 31 | | | | | | 2753 |
| ENV | ILKCNDKK | 271 | 8 | 12 | 19 | | | | | | 2754 |
| ENV | SVEINCTR | 340 | 8 | 13 | 20 | | | | | | 2755 |
| ENV | GTAGNSSR | 375 | 8 | 01 | 33 | | | | | | 2756 |
| ENV | TTHSFNCR | 432 | 8 | 12 | 19 | | | | | | 2757 |
| ENV | ITLPCRIK | 483 | 8 | 26 | 41 | | | | | | 2758 |
| ENV | NMWQEVGK | 494 | 8 | 15 | 23 | | | | | | 2759 |
| ENV | ITGLLLTR | 520 | 8 | 37 | 58 | | | | | | 2760 |
| ENV | RSELYKYK | 558 | 8 | 54 | 84 | | | | | | 2761 |
| ENV | PLGVAPTK | 571 | 8 | 26 | 41 | | | | | | 2762 |
| ENV | PLGVAPTR | 571 | 8 | 10 | 16 | | | | | | 2763 |
| ENV | GVAPTKAK | 573 | 8 | 19 | 30 | | | | | | 2764 |
| ENV | VAPTKAKR | 574 | 8 | 19 | 30 | | | | | | 2765 |
| ENV | VISTRTIIR | 584 | 8 | 01 | 50 | | | | | | 2766 |
| ENV | STRTIIREK | 586 | 8 | 01 | 50 | | | | | | 2767 |
| ENV | RVVEREKR | 587 | 8 | 32 | 50 | | | | | | 2768 |
| ENV | RVVQREKR | 587 | 8 | 17 | 27 | 0.0003 | 0.0001 | | | | 2769 |
| ENV | ITLTVQAR | 621 | 8 | 32 | 50 | | | | | | 2770 |
| ENV | EAQQIILLK | 646 | 8 | 12 | 19 | | | | | | 2771 |
| ENV | KLTVWGIK | 653 | 8 | 13 | 20 | | | | | | 2772 |
| ENV | QLTVWGIK | 653 | 8 | 44 | 69 | | | | | | 2773 |
| ENV | GIKQLQAR | 658 | 8 | 49 | 77 | | | | | | 2774 |
| ENV | LAVERYLK | 667 | 8 | 26 | 41 | | | | | | 2775 |
| ENV | LAVERYLR | 667 | 8 | 11 | 17 | | | | | | 2776 |
| ENV | GIWGCSGK | 680 | 8 | 52 | 81 | | | | | | 2777 |
| ENV | MTWMEWER | 721 | 8 | 12 | 19 | | | | | | 2778 |
| ENV | ESQNQQEK | 743 | 8 | 27 | 42 | | | | | | 2779 |
| ENV | AVLSIVNR | 795 | 8 | 31 | 48 | | | | | | 2780 |
| ENV | LSIVNRVR | 797 | 8 | 38 | 59 | | | | | | 2781 |
| ENV | ALAWDDLR | 851 | 8 | 25 | 39 | | | | | | 2782 |
| ENV | RIVELLGR | 878 | 8 | 22 | 34 | | | | | | 2783 |
| ENV | IVELLGRR | 879 | 8 | 22 | 34 | | | | | | 2784 |
| ENV | RLGWEGLK | 894 | 8 | 10 | 32 | | | | | | 2785 |
| ENV | AVAEGTDR | 928 | 8 | 31 | 48 | | | | | | 2786 |
| ENV | RAILIIIPR | 945 | 8 | 13 | 20 | | | | | | 2787 |
| ENV | AILHIPRR | 946 | 8 | 13 | 20 | | | | | | 2788 |
| ENV | RIRQGLER | 953 | 8 | 44 | 69 | | | | | | 2789 |
| ENV | TLFCASDAK | 64 | 9 | 52 | 81 | 0.0930 | 0.5300 | 0.0017 | 0.0013 | 0.0420 | 2790 |
| ENV | VTENFNMWK | 102 | 9 | 31 | 48 | | | | | | 2791 |
| ENV | ISLWDQSLK | 122 | 9 | 47 | 73 | 0.0048 | 0.0890 | 0.0017 | 0.0013 | 0.0021 | 2792 |
| ENV | SAITQACPK | 243 | 9 | 14 | 22 | | | | | | 2793 |
| ENV | STITQACPK | 243 | 9 | 10 | 16 | | | | | | 2794 |
| ENV | SVITQACPK | 243 | 9 | 17 | 27 | | | | | | 2795 |
| ENV | FAILKCNDK | 269 | 9 | 14 | 22 | 0.0002 | 0.0002 | 0.0004 | 0.0015 | 0.0027 | 2796 |
| ENV | AILKCNDKK | 270 | 9 | 12 | 19 | | | | | | 2797 |
| ENV | TVQCTIIGIK | 290 | 9 | 28 | 44 | 0.0021 | 0.0460 0.0042 | 0.0017 | 0.0190 | 2798 | |
| ENV | TVQCTIIGIR | 290 | 9 | 23 | 36 | 0.0008 | 0.0008 | 0.0880 | 0.0330 | 0.0120 | 2799 |
| ENV | LAEEEVVIR | 312 | 9 | 12 | 19 | 0.0002 | 0.0002 | 0.0004 | 0.0007 | 0.0002 | 2800 |
| ENV | CTRPNNNTR | 345 | 9 | 28 | 44 | | | | | | 2801 |
| ENV | ITTIISFNCR | 431 | 9 | 11 | 17 | | | | | | 2802 |
| ENV | NANITIPCR | 478 | 9 | 01 | 50 | | | | | | 2803 |
| ENV | NITLPCRIK | 482 | 9 | 11 | 17 | | | | | | 2804 |
| ENV | TITLPCRIK | 482 | 9 | 14 | 22 | | | | | | 2805 |
| ENV | NITGLLLTR | 519 | 9 | 35 | 55 | 0.0004 | 0.0001 | | | | 2806 |
| ENV | STNGTETFR | 537 | 9 | 01 | 17 | | | | | | 2807 |
| ENV | ELYKYKVVK | 560 | 9 | 32 | 50 | | | | | | 2808 |
| ENV | GVAPTKAKR | 573 | 9 | 19 | 30 | | | | | | 2809 |
| ENV | VAPTKAKRR | 574 | 9 | 17 | 27 | 0.0002 | 0.0002 | 0.0004 | 0.0006 | 0.0002 | 2810 |
| ENV | KAKRRVVQR | 579 | 9 | 13 | 20 | 0.0002 | 0.0002 | 0.0800 | 0.0095 | 0.0002 | 2811 |
| ENV | IINIIITPHR | 584 | 9 | 01 | 50 | | | | | | 2812 |
| ENV | ISTRTHREK | 585 | 9 | 01 | 50 | | | | | | 2813 |
| ENV | NIIITPHREK | 586 | 9 | 01 | 50 | | | | | | 2814 |
| ENV | STRTIIREKR | 586 | 9 | 01 | 50 | | | | | | 2815 |
| ENV | SITLTVQAR | 620 | 9 | 32 | 50 | | | | | | 2816 |
| ENV | QARYLAVER | 663 | 9 | 33 | 52 | 0.0009 | 0.0003 | 0.0320 | 0.0320 | 0.0007 | 2817 |
| ENV | VLAVERYLK | 666 | 9 | 18 | 28 | | | | | | 2818 |
| ENV | VLAVERYLR | 666 | 9 | 11 | 17 | | | | | | 2819 |
| ENV | NMTWMEWER | 720 | 9 | 12 | 19 | | | | | | 2820 |
| ENV | ISNWLWYIK | 770 | 9 | 11 | 17 | | | | | | 2821 |
| ENV | ITKWLWYIK | 770 | 9 | 16 | 25 | | | | | | 2822 |
| ENV | ITNWLWYIK | 770 | 9 | 15 | 23 | | | | | | 2823 |
| ENV | IVGGLIGLR | 783 | 9 | 42 | 66 | | | | | | 2824 |
| ENV | FAVLSIVNR | 794 | 9 | 31 | 48 | | | | | | 2825 |
| ENV | VLSIVNRVR | 796 | 9 | 38 | 59 | | | | | | 2826 |
| ENV | GIEEEGGER | 829 | 9 | 12 | 19 | | | | | | 2827 |
| ENV | LALAWDDLR | 850 | 9 | 25 | 39 | | | | | | 2828 |
| ENV | NLCLFSYIIR | 859 | 9 | 11 | 17 | | | | | | 2829 |
| ENV | SLCLFSYIIR | 859 | 9 | 31 | 48 | | | | | | 2830 |
| ENV | CLFSYIIRLR | 861 | 9 | 42 | 66 | | | | | | 2831 |
| ENV | RIVELLGRR | 878 | 9 | 22 | 34 | 0.0550 | 0.0100 | 0.1300 | 0.0021 | 0.0180 | 2832 |
| ENV | IAVAEGTDR | 927 | 9 | 31 | 48 | 0.0004 | 0.0003 | 0.0003 | 0.0004 | 0.0030 | 2833 |
| ENV | RAILIIIPRR | 945 | 9 | 13 | 20 | | | | | | 2834 |
| ENV | ILHIPRRIR | 947 | 9 | 13 | 20 | | | | | | 2835 |
| ENV | TVYYGVPVWK | 48 | 10 | 41 | 64 | 3.8000 | 7.8000 | | | | 2836 |
| ENV | TTLFCASDAK | 61 | 10 | 50 | 78 | 0.0920 | 0.2200 | 0.0019 | 0.0021 | 0.0570 | 2837 |
| ENV | NVTENPNMWK | 101 | 10 | 31 | 48 | | | | | | 2838 |
| ENV | IISLWDQSLK | 121 | 10 | 38 | 59 | 0.0410 | 0.0540 | 0.0017 | 0.0020 | 0.0029 | 2839 |
| ENV | TSAITQACPK | 242 | 10 | 14 | 22 | | | | | | 2840 |
| ENV | TSVITQACPK | 242 | 10 | 14 | 22 | | | | | | 2841 |
| ENV | CAPAGFAILK | 264 | 10 | 29 | 45 | | | | | | 2842 |
| ENV | FAILKCNDKK | 269 | 10 | 10 | 16 | | | | | | 2843 |
| ENV | STVQCTHGIK | 289 | 10 | 28 | 44 | | | | | | 2844 |
| ENV | STVQCTHGIR | 289 | 10 | 23 | 36 | | | | | | 2845 |
| ENV | SLAEEEVVIR | 311 | 10 | 12 | 19 | | | | | | 2846 |
| ENV | CTRPNNNTRK | 345 | 10 | 22 | 34 | | | | | | 2847 |
| ENV | ATGDIIGDIR | 369 | 10 | 12 | 19 | | | | | | 2848 |
| ENV | EITTIISFNCR | 430 | 10 | 11 | 17 | | | | | | 2849 |
| ENV | IINMWQEVGK | 492 | 10 | 12 | 19 | | | | | | 2850 |
| ENV | GSENGTETFR | 538 | 10 | 02 | 18 | | | | | | 2851 |
| ENV | PLGVAPTKAK | 571 | 10 | 19 | 30 | | | | | | 2852 |
| ENV | GVAPTKAKRR | 573 | 10 | 17 | 27 | | | | | | 2853 |
| ENV | VISTRTIIREK | 584 | 10 | 01 | 50 | | | | | | 2854 |
| ENV | ISTRTIIREKR | 585 | 10 | 01 | 50 | | | | | | 2855 |
| ENV | NIIITPIIREKR | 586 | 10 | 01 | 50 | | | | | | 2856 |
| ENV | ASITLTVQAR | 619 | 10 | 28 | 44 | | | | | | 2857 |
| ENV | IVQQQNNLLR | 634 | 10 | 25 | 39 | 0.0024 | 0.0190 | 0.0130 | 0.0072 | 0.0035 | 2858 |
| ENV | IVQQQSNLLR | 634 | 10 | 26 | 41 | | | | | | 2859 |
| ENV | AIEAQQIILLK | 644 | 10 | 12 | 19 | | | | | | 2860 |
| ENV | LLKLTVWGIK | 651 | 10 | 13 | 20 | | | | | | 2861 |
| ENV | LLQLIVWGIK | 651 | 10 | 34 | 53 | 0.0055 | 0.0110 | | | | 2862 |
| ENV | MLQLTVWGIK | 651 | 10 | 10 | 16 | | | | | | 2863 |
| ENV | RVLAVERYLK | 665 | 10 | 18 | 28 | | | | | | 2864 |
| ENV | RVLAVERYLR | 665 | 10 | 10 | 16 | | | | | | 2865 |
| ENV | LLGIWGCSGK | 678 | 10 | 50 | 78 | 0.1200 | 0.0120 | 0.0017 | 0.0020 | 0.0001 | 2866 |
| ENV | MIVGGLICLR | 782 | 10 | 36 | 56 | | | | | | 2867 |
| ENV | AVLSIVNRVR | 795 | 10 | 31 | 48 | | | | | | 2868 |
| ENV | FLALAWDDLR | 849 | 10 | 25 | 39 | | | | | | 2869 |
| ENV | RSLCLFSYIIR | 858 | 10 | 31 | 48 | | | | | | 2870 |
| ENV | GLRLGWEGLK | 892 | 10 | 10 | 32 | | | | | | 2871 |
| ENV | LLQYWSQELK | 906 | 10 | 12 | 19 | | | | | | 2872 |
| ENV | AIAVAEGTDR | 926 | 10 | 31 | 48 | | | | | | 2873 |
| ENV | AILIIIPRRIR | 946 | 10 | 12 | 19 | | | | | | 2874 |
| ENV | PTRIRQGLER | 951 | 10 | 12 | 19 | | | | | | 2875 |
| ENV | VTVYYGVPVWK | 47 | 11 | 41 | 64 | 0.8600 | 4.1000 | | | | 2876 |
| ENV | KTTLFCASDAK | 60 | 11 | 12 | 19 | | | | | | 2877 |
| ENV | TTTLFCASDAK | 60 | 11 | 22 | 34 | | | | | | 2878 |
| ENV | DIISLWDQSLK | 120 | 11 | 38 | 59 | | | | | | 2879 |
| ENV | NTSAITQACPK | 241 | 11 | 14 | 22 | | | | | | 2880 |
| ENV | NISVITQACPK | 241 | 11 | 13 | 20 | | | | | | 2881 |
| ENV | VSTVQCTHGIK | 288 | 11 | 28 | 44 | | | | | | 2882 |
| ENV | VSTVQCTHGIR | 288 | 11 | 23 | 36 | | | | | | 2883 |
| ENV | GSLAEEEVVIR | 310 | 11 | 12 | 19 | | | | | | 2884 |
| ENV | YATGCIIGDIR | 368 | 11 | 11 | 17 | | | | | | 2885 |
| ENV | KLREIRQFENK | 405 | 11 | 01 | 25 | | | | | | 2886 |
| ENV | HTEGNITLQCR | 478 | 11 | 01 | 50 | | | | | | 2887 |
| ENV | NANITIPCRIK | 478 | 11 | 01 | 50 | | | | | | 2888 |
| ENV | QIINMWQEVGK | 491 | 11 | 12 | 19 | | | | | | 2889 |
| ENV | SSNITGLLLTR | 516 | 11 | 19 | 30 | | | | | | 2890 |
| ENV | NTETNKTETFR | 537 | 11 | 01 | 17 | | | | | | 2891 |
| ENV | NTTGNTTETFR | 537 | 11 | 01 | 17 | | | | | | 2892 |
| ENV | EIFRPGGGDMR | 544 | 11 | 15 | 23 | | | | | | 2893 |
| ENV | ETFRPGGGDMR | 544 | 11 | 20 | 31 | | | | | | 2894 |
| ENV | RSELYKYKVVK | 558 | 11 | 29 | 45 | | | | | | 2895 |
| ENV | KIEPLGVAPTK | 568 | 12 | 15 | 24 | | | | | | 2896 |
| ENV | PLGVAPTKAKR | 571 | 11 | 19 | 30 | | | | | | 2897 |
| ENV | PTKAKRRVVQR | 576 | 11 | 13 | 20 | | | | | | 2898 |
| ENV | KAKRRVVQREK | 579 | 11 | 13 | 20 | | | | | | 2899 |
| ENV | IINIHTPIIREK | 584 | 11 | 01 | 50 | | | | | | 2900 |
| ENV | VISTRTHREKR | 584 | 11 | 01 | 50 | | | | | | 2901 |
| ENV | AASITLTVQAR | 618 | 11 | 28 | 44 | | | | | | 2902 |
| ENV | GIVQQQNNLLR | 633 | 11 | 25 | 39 | | | | | | 2903 |
| ENV | GIVQQQSNLLR | 633 | 11 | 26 | 41 | | | | | | 2904 |
| ENV | HLLKLTVWGIK | 650 | 11 | 13 | 20 | | | | | | 2905 |
| ENV | HLLQLTVWGIK | 650 | 11 | 34 | 53 | | | | | | 2906 |
| ENV | TVWGIKQLQAR | 655 | 11 | 48 | 75 | | | | | | 2907 |
| ENV | QLQARVLAVER | 661 | 11 | 33 | 52 | | | | | | 2908 |
| ENV | QLLGIWGCSGK | 677 | 11 | 50 | 78 | | | | | | 2909 |
| ENV | NVPWNSSWSNK | 693 | 11 | 10 | 16 | | | | | | 2910 |
| ENV | LIEESQNQQEK | 740 | 11 | 20 | 31 | | | | | | 2911 |
| ENV | IMIVGGLIGLR | 781 | 11 | 34 | 54 | | | | | | 2912 |
| ENV | IIFAVLSIVNR | 792 | 11 | 14 | 22 | | | | | | 2913 |
| ENV | IVFAVLSIVNR | 792 | 11 | 17 | 27 | | | | | | 2914 |
| ENV | FAVLSIVNRVR | 794 | 11 | 31 | 48 | | | | | | 2915 |
| ENV | GIEEEGGERDR | 829 | 11 | 12 | 19 | | | | | | 2916 |
| ENV | NLCLFSYHRLR | 859 | 11 | 11 | 17 | | | | | | 2917 |
| ENV | SLCLFSYIIRLR | 859 | 11 | 31 | 48 | | | | | | 2918 |
| ENV | LLGRRGWEALK | 882 | 11 | 09 | IS | | | | | | 2919 |
| ENV | NLLQYWSQELK | 905 | 11 | 12 | 19 | | | | | | 2920 |
| ENV | IAIAVAEGTDR | 925 | 11 | 10 | 16 | | | | | | 2921 |
| ENV | TAIAVAEGTDR | 925 | 11 | 21 | 33 | | | | | | 2922 |
| ENV | RAILHIPRRIR | 945 | 11 | 12 | 19 | | | | | | 2923 |
| GAG | GARASILR | 2 | 8 | 10 | 16 | | | | | | 2924 |
| GAG | ASVLSGGK | 5 | 8 | 29 | 45 | | | | | | 2925 |
| GAG | RLRPGGKK | 20 | 8 | 49 | 77 | | | | | | 2926 |
| GAG | WASRELER | 37 | 8 | 48 | 75 | | | | | | 2927 |
| GAG | QTGSEELR | 71 | 8 | 12 | 19 | | | | | | 2928 |
| GAG | TLYCVHQK | 86 | 8 | 12 | 19 | | | | | | 2929 |
| GAG | TLYCVHQR | 86 | 8 | I5 | 23 | | | | | | 2930 |
| GAG | RIEVKDTK | 93 | 8 | 13 | 20 | | | | | | 2931 |
| GAC | DTKEALDK | 98 | 8 | 36 | 56 | 0.0003 | 0.0001 | | | | 2932 |
| GAG | DTKEALEK | 98 | 8 | 12 | 19 | | | | | | 2933 |
| GAG | KIEEEQNK | 105 | 8 | 23 | 36 | | | | | | 2934 |
| GAG | PAAADKEK | 123 | 8 | 01 | 50 | | | | | | 2935 |
| GAG | RTLNAWVK | 171 | 8 | 63 | 98 | 0.0410 | 0.0560 | | | | 2936 |
| GAG | WVKVIEEK | 176 | 8 | 29 | 45 | | | | | | 2937 |
| GAG | WVKVVEEK | 176 | 8 | 31 | 48 | 0.0003 | 0.0001 | | | | 2938 |
| GAG | QAAMQMLK | 216 | 8 | 61 | 95 | | | | | | 2939 |
| GAG | PIAPGQMR | 243 | 8 | 19 | 30 | | | | | | 2940 |
| GAG | PIPPGQMR | 243 | 8 | 17 | 27 | | | | | | 2941 |
| GAG | PVAPGQMR | 243 | 8 | 10 | 16 | | | | | | 2942 |
| GAG | PVGDIYKR | 281 | 8 | 18 | 28 | | | | | | 2943 |
| GAG | PVGEIYKR | 281 | 8 | 40 | 63 | 0.0003 | 0.0001 | | | | 2944 |
| GAG | WIILGLNK | 289 | 8 | 57 | 89 | | | | | | 2945 |
| GAG | PTSILDIR | 303 | 8 | 12 | 19 | | | | | | 2946 |
| GAG | PVSILDIK | 303 | 8 | 16 | 25 | | | | | | 2947 |
| GAG | PVSILDIR | 303 | 8 | 25 | 39 | | | | | | 2948 |
| GAG | GVGGPGHK | 376 | 8 | 37 | 58 | 0.0012 | 0.0018 | | | | 2949 |
| GAG | GVGGPSHK | 376 | 8 | 23 | 36 | | | | | | 2950 |
| GAG | ASAQQDLK | 392 | 8 | 01 | 50 | | | | | | 2951 |
| GAG | ATAQQDLK | 392 | 8 | 01 | 50 | | | | | | 2952 |
| GAG | AAAIMMQK | 400 | 8 | 04 | 19 | | | | | | 2953 |
| GAG | AAAIMMQK | 405 | 8 | 01 | 25 | | | | | | 2954 |
| GAG | SATIMMQR | 405 | 8 | 01 | 25 | | | | | | 2955 |
| GAG | YTAVFMQR | 405 | 8 | 02 | 50 | | | | | | 2956 |
| GAG | MMQKSNFK | 409 | 8 | 10 | 16 | | | | | | 2957 |
| GAG | MMQRGNFK | 409 | 8 | 10 | 16 | | | | | | 2958 |
| GAG | MMQRGNPR | 409 | 8 | 23 | 36 | | | | | | 2959 |
| GAG | QMKDCTER | 455 | 8 | 49 | 77 | | | | | | 2960 |
| GAG | RASVLSGGK | 4 | 9 | 29 | 45 | | | | | | 2961 |
| GAG | KLDAWEKIR | 12 | 9 | 16 | 25 | | | | | | 2962 |
| GAG | KLDKWEKIR | 12 | 9 | 10 | 16 | | | | | | 2963 |
| GAG | DAWEKIRLR | 14 | 9 | 17 | 27 | | | | | | 2964 |
| GAG | KIRLRPGGK | 18 | 9 | 44 | 69 | | | | | | 2965 |
| GAG | RLRPGGKKK | 20 | 9 | 34 | 53 | | | | | | 2966 |
| GAG | LLETSEGCR | 52 | 9 | 17 | 27 | | | | | | 2967 |
| GAG | ATLYCVIIQK | 85 | 9 | 12 | 19 | | | | | | 2968 |
| GAG | ATLYCVIIQR | 85 | 9 | 15 | 23 | 0.0150 | 0.7100 | | | | 2969 |
| GAG | MVHQAISPR | 163 | 9 | 27 | 42 | 0.1800 | 0.0670 | 1.0000 | 2.1000 | 0.8400 | 2970 |
| GAG | PIPYGEIYK | 279 | 9 | 35 | 55 | 0.0002 | 0.0012 | 0.0006 | 0.0005 | 0.0003 | 2971 |
| GAG | ILGLNKIVR | 291 | 9 | 58 | 91 | 0.0008 | 0.0001 | 0.0032 | 0.0100 | 0.0004 | 2972 |
| GAG | ILDIKQGPK | 306 | 9 | 19 | 30 | | | | | | 2973 |
| GAG | ILDIRQGPK | 306 | 9 | 42 | 66 | 0.0420 | 0.0048 | 0.0006 | 0.0006 | 0.0002 | 2974 |
| GAG | NSATIMMQR | 404 | 9 | 01 | 33 | | | | | | 2975 |
| GAG | IMMQKSNFK | 408 | 9 | 10 | 16 | | | | | | 2976 |
| GAG | IMMQRGNFR | 408 | 9 | 20 | 31 | | | | | | 2977 |
| GAG | IVKCFNCGK | 422 | 9 | 13 | 20 | | | | | | 2978 |
| GAG | TIKCFNCGK | 422 | 9 | 11 | 17 | | | | | | 2979 |
| GAG | TVKCFNCGK | 422 | 9 | 11 | 17 | | | | | | 2960 |
| GAG | IAKNCRAPR | 434 | 9 | 18 | 29 | 0.0009 | 0.0003 | 0.0330 | 0.0500 | 0.0039 | 2981 |
| GAG | IARNCRAPR | 434 | 9 | 13 | 21 | | | | | | 2982 |
| GAG | LARNCRAPR | 434 | 9 | 20 | 32 | | | | | | 2983 |
| GAG | KIWPSHKGR | 472 | 9 | 22 | 35 | 0.0770 | 0.0005 | 0.4400 | 0.0087 | 0.0001 | 2984 |
| GAG | KIWPSNKGR | 472 | 9 | 13 | 21 | | | | | | 2985 |
| GAG | KIWPSSKGR | 472 | 9 | 10 | 16 | | | | | | 2986 |
| GAG | TAPPEESFR | 496 | 9 | 15 | 23 | | | | | | 2987 |
| GAG | TAPPAESFR | 508 | 9 | 02 | 67 | | | | | | 2988 |
| GAG | TAPPEESFR | 508 | 9 | 01 | 33 | | | | | | 2989 |
| GAG | KIRLRPGGKK | 18 | 10 | 44 | 69 | 1.9000 | 0.0010 | 0.0008 | 0.0005 | 0.0001 | 2990 |
| GAG | KLKIIIVWASR | 31 | 10 | 13 | 20 | | | | | | 2991 |
| GAG | RLKIILVWASR | 31 | 10 | 17 | 27 | | | | | | 2992 |
| GAG | IVWASRELER | 35 | 10 | 20 | 31 | 0.0099 | 0.0066 | | | | 2993 |
| GAG | LVWASRELER | 35 | 10 | 26 | 41 | | | | | | 2994 |
| GAG | GLLETSEGCR | 51 | 10 | 16 | 25 | | | | | | 2995 |
| GAG | VATLYCVIIQK | 84 | 10 | 12 | 19 | | | | | | 2996 |
| GAG | VATLYCVIIQR | 84 | 10 | 15 | 23 | | | | | | 2997 |
| GAG | KIEEEQNKSK | 105 | 10 | 15 | 23 | | | | | | 2998 |
| GAG | QMVIIQAISPR | 162 | 10 | 27 | 42 | 0.0260 | 0.0010 | 0.0740 | 0.1000 | 0.0430 | 2999 |
| GAG | NAWVKVIEEK | 174 | 10 | 29 | 45 | | | | | | 3000 |
| GAG | NAWVKVVEEK | 174 | 10 | 30 | 47 | 0.0004 | 0.0002 | | | | 3001 |
| GAG | IAPGQMREPR | 244 | 10 | 19 | 30 | | | | | | 3002 |
| GAG | PIPVGEIYKR | 279 | 10 | 34 | 53 | 0.0003 | 0.0001 | 0.0009 | 0.0010 | 0.0005 | 3003 |
| GAG | IILGLNKIVR | 290 | 10 | 57 | 89 | 0.0003 | 0.0006 | 0.0110 | 0.0260 | 0.0073 | 3004 |
| GAG | YSPTSILDIR | 301 | 10 | 12 | 19 | | | | | | 3005 |
| GAG | YSPVSILDIK | 301 | 10 | 16 | 25 | | | | | | 3006 |
| GAG | YSPVSILDIR | 301 | 10 | 24 | 38 | | | | | | 3007 |
| GAG | SILDIKQGPK | 305 | 10 | 18 | 28 | | | | | | 3008 |
| GAG | SILDIRQGPK | 305 | 10 | 40 | 63 | 0.3100 | 0.7100 | 0.0017 | 0.0020 | 0.0060 | 3009 |
| GAG | YVDRFFKILR | 320 | 10 | 27 | 42 | | | | | | 3010 |
| GAG | YVDRIFYKTLR | 320 | 10 | 28 | 44 | 0.0003 | 0.0006 | | | | 3011 |
| GAG | RAEQASQIWK | 329 | 10 | 12 | 19 | | | | | | 3112 |
| GAG | RAEQATQDVK | 329 | 10 | 15 | 23 | | | | | | 3013 |
| GAG | RAEQATQEVK | 329 | 10 | 27 | 42 | | | | | | 3014 |
| GAG | LVQNANPDCK | 346 | 10 | 59 | 92 | 0.0002 | 0.0110 | | | | 3015 |
| GAG | GVGGPGIIKAR | 376 | 10 | 37 | 58 | 0.0003 | 0.0001 | | | | 3016 |
| GAG | GVGGPSIIKAR | 376 | 10 | 22 | 34 | | | | | | 3017 |
| GAG | TIMMQRGNFR | 407 | 10 | 12 | 21 | | | | | | 3018 |
| GAG | KTVKCFNCGK | 421 | 10 | 08 | 16 | | | | | | 3019 |
| GAG | HIAKNCRAPR | 433 | 10 | 18 | 28 | | | | | | 3020 |
| GAG | HIARNCRAPR | 433 | 10 | 13 | 20 | | | | | | 3021 |
| GAG | HLARNCRAPR | 433 | 10 | 20 | 31 | | | | | | 3022 |
| GAG | IAKNCRAPRK | 434 | 10 | 16 | 25 | | | | | | 3023 |
| GAG | IARNCRAPRK | 434 | 10 | 13 | 21 | | | | | | 3024 |
| GAG | LARNCRAPRK | 434 | 10 | 20 | 32 | | | | | | 3025 |
| GAG | RAPRKKGCWK | 439 | 10 | 51 | 80 | | | | | | 3026 |
| GAG | FLGKIWPSHK | 469 | 10 | 23 | 36 | 0.0200 | 0.0013 | | | | 3027 |
| GAG | FLGKIWPSNK | 469 | 10 | 13 | 20 | | | | | | 3028 |
| GAG | FLGKIWPSSK | 469 | 10 | 10 | 16 | | | | | | 3029 |
| GAG | GTRPGNYVQK | 480 | 10 | 01 | 50 | | | | | | 3030 |
| GAG | GTRPGNYVQR | 480 | 10 | 01 | 50 | | | | | | 3031 |
| GAG | PTAPPEESFR | 495 | 10 | 15 | 23 | | | | | | 3032 |
| GAG | PTAPPAESFR | 507 | 10 | 02 | 67 | | | | | | 3033 |
| GAG | PTAPPPESFR | 507 | 10 | 01 | 33 | | | | | | 3034 |
| GAG | ITSLPKQEQK | 526 | 10 | 01 | 50 | | | | | | 3035 |
| GAG | PSQKQEPIDK | 528 | 10 | 11 | 18 | | | | | | 3036 |
| GAG | GARASVLSGGK | 2 | 11 | 29 | 46 | | | | | | 3037 |
| GAG | LSGGKLDAWEK | 8 | 11 | 15 | 23 | | | | | | 3038 |
| GAG | KLDAWEKIRLR | 12 | 11 | 16 | 25 | | | | | | 3039 |
| GAG | KLDKWEKIRLR | 12 | 11 | 10 | 16 | | | | | | 3040 |
| GAG | KIRLRPGGKKK | 18 | 11 | 30 | 47 | | | | | | 3041 |
| GAG | RLRPGGKKKYK | 20 | 11 | 12 | 19 | | | | | | 3042 |
| GAG | RLRPGGKKKYR | 20 | 11 | 19 | 30 | | | | | | 3043 |
| GAG | HIVWASRELER | 34 | 11 | 20 | 31 | | | | | | 3044 |
| GAG | HLVWASRELER | 34 | 11 | 26 | 41 | | | | | | 3045 |
| GAG | TVATLYCVIIQK | 83 | 11 | 12 | 19 | | | | | | 3046 |
| GAG | TVATLYCVIIQR | 83 | 11 | 14 | 22 | | | | | | 3047 |
| GAG | EVKDIKEALDK | 95 | 11 | 13 | 20 | | | | | | 3048 |
| GAG | ALDKIEEEQNK | 102 | 11 | 17 | 27 | | | | | | 3049 |
| GAG | KIEEEQNKSKK | 105 | 11 | 15 | 23 | | | | | | 3050 |
| GAG | PAAADKEKDSK | 123 | 11 | 01 | 50 | | | | | | 3051 |
| GAG | ISPRTLNAWVK | 168 | 11 | 36 | 56 | | | | | | 3052 |
| GAG | LSPRTLNAWVK | 168 | 11 | 17 | 27 | | | | | | 3053 |
| GAC | TINEEAAEWDR | 225 | 11 | 53 | 83 | | | | | | 3054 |
| GAG | HAGPIAPGQMR | 240 | 11 | 18 | 28 | | | | | | 3055 |
| GAG | IIAGPIPPGQMR | 240 | 11 | 17 | 27 | | | | | | 3056 |
| GAG | PIAPGQMREPR | 243 | 11 | 19 | 30 | | | | | | 3057 |
| GAG | PIPPGQMREPR | 243 | 11 | 17 | 27 | | | | | | 3058 |
| GAG | WIILGLNKIVR | 289 | 11 | 57 | 89 | | | | | | 3059 |
| GAG | TSILDIRQGPK | 304 | 11 | 12 | 19 | | | | | | 3060 |
| GAG | VSILDIKQGPK | 304 | 11 | 16 | 25 | | | | | | 3061 |
| GAG | VSILDIRQGPK | 304 | 11 | 25 | 39 | | | | | | 3062 |
| GAG | DIKQGIKEPFR | 308 | 11 | 19 | 30 | | | | | | 3063 |
| GAG | DIRQGPKEPFR | 308 | 11 | 41 | 64 | | | | | | 3064 |
| GAG | LLVQNANPDCK | 345 | 11 | 58 | 91 | | | | | | 3065 |
| GAG | NANPDCKTILK | 349 | 11 | 27 | 42 | | | | | | 3066 |
| GAG | NANPDCKTILR | 349 | 11 | 18 | 28 | | | | | | 3067 |
| GAG | AAIMMQKSNFK | 406 | 11 | 06 | 15 | | | | | | 3068 |
| GAG | ATIMMQRGNFR | 406 | 11 | 11 | 28 | | | | | | 3069 |
| GAG | MMQRGNFRNQR | 409 | 11 | 15 | 23 | | | | | | 3070 |
| GAG | IIIAKNCRAPRK | 433 | 11 | 16 | 25 | | | | | | 3071 |
| GAG | IIIARNCRAPRK | 433 | 11 | 13 | 20 | | | | | | 3072 |
| GAG | IILARNCRAPRK | 433 | 11 | 20 | 31 | | | | | | 3073 |
| GAG | IAKNCRAPRKK | 434 | 11 | 14 | 22 | | | | | | 3074 |
| GAG | IARNCRAPRKK | 434 | 11 | 13 | 21 | | | | | | 3075 |
| GAG | LARNCRAPRKK | 434 | 11 | 19 | 30 | | | | | | 3076 |
| GAG | CTERQANFLGK | 459 | 11 | 52 | 83 | | | | | | 3077 |
| GAG | EITSLPKQEQK | 525 | 11 | 01 | 50 | | | | | | 3078 |
| NEF | AVSQDLDK | 48 | 8 | 10 | 16 | | | | | | 3079 |
| NEF | AVSRDLEK | 48 | 8 | 11 | 17 | | | | | | 3080 |
| NEF | PLRPMTFK | 102 | 8 | 10 | 16 | | | | | | 3081 |
| NEF | PLRPMTYK | 102 | 8 | 49 | 77 | 0.0010 | 0.0003 | | | | 3082 |
| NEF | LSFFLKEK | 114 | 8 | 22 | 34 | | | | | | 3083 |
| NEF | LSHFLKEK | 114 | 8 | 27 | 42 | | | | | | 3084 |
| NEF | GLIYSKKR | 173 | 8 | 23 | 36 | | | | | | 3085 |
| NEF | YTPGPGIR | 207 | 8 | 20 | 31 | | | | | | 3086 |
| NEF | YTPGPGTR | 207 | 8 | 21 | 33 | | | | | | 3087 |
| NEF | YTPGPGVR | 207 | 8 | 12 | 19 | | | | | | 3088 |
| NEF | LTFGWCFK | 221 | 8 | 39 | 61 | | | | | | 3089 |
| NEF | KLVPVDPR | 228 | 8 | 11 | 17 | | | | | | 3090 |
| NEF | ELHPEFYK | 324 | 8 | 14 | 22 | | | | | | 3091 |
| NEF | ELHPEYYK | 324 | 8 | 22 | 34 | | | | | | 3092 |
| NEF | GAVSQDLDK | 47 | 9 | 10 | 16 | | | | | | 3093 |
| NEF | GAVSRDLEK | 47 | 9 | 11 | 17 | 0.0002 | 0.0009 | 0.0004 | 0.0006 | 0.0001 | 3094 |
| NEF | PVRPQVPLR | 95 | 9 | 48 | 75 | | | | | | 3095 |
| NEF | AVDLSHFLK | 111 | 9 | 14 | 22 | 0.0740 | 1.1000 | 0.0009 | 0.0008 | 0.0025 | 3096 |
| NEF | DLSFFLKEK | 113 | 9 | 22 | 34 | | | | | | 3097 |
| NEF | DLSIIFLKEK | 113 | 9 | 27 | 42 | | | | | | 3098 |
| NEF | GLDGLIYSK | 125 | 9 | 16 | 25 | | | | | | 3099 |
| NEF | GLEGLIYSK | 125 | 9 | 10 | 16 | | | | | | 3100 |
| NEF | PLTFGWCFK | 219 | 9 | 39 | 61 | | | | | | 3101 |
| NEF | AADGVGAVSR | 42 | 10 | 09 | 15 | | | | | | 3102 |
| NEF | QVPLRPMTFK | 100 | 10 | 10 | 16 | | | | | | 3103 |
| NEF | QVPLRPMTYK | 100 | 10 | 46 | 72 | 0.6100 | 0.6300 | 0.0098 | 0.0130 | 0.0600 | 3104 |
| NEF | GAFDLSFFLK | 110 | 10 | 10 | 16 | | | | | | 3105 |
| NEF | GLDGLIYSKK | 125 | 10 | 14 | 22 | | | | | | 3106 |
| NEF | GVGAVSQDLDK | 45 | 11 | 10 | 16 | | | | | | 3107 |
| NEF | GVGAVSRDLEK | 45 | 11 | 11 | 17 | | | | | | 3108 |
| NEF | AVDLSIIFLKEK | 111 | 11 | 13 | 20 | | | | | | 3109 |
| NEF | GLDGLIYSKKR | 125 | 11 | 14 | 22 | | | | | | 3110 |
| NEF | MARELIIPEYYK | 321 | 11 | 10 | 16 | | | | | | 3111 |
| POL | RANSPTRR | 26 | 8 | 16 | 25 | | | | | | 3112 |
| POL | RANSPTSR | 26 | 8 | 17 | 27 | | | | | | 3113 |
| POL | STNSPTSR | 32 | 8 | 01 | 33 | | | | | | 3114 |
| POL | RANSPSSR | 35 | 8 | 01 | 33 | | | | | | 3115 |
| POL | RANSPTTR | 37 | 8 | 01 | 50 | | | | | | 3116 |
| POL | ILIEICGK | 149 | 11 | 14 | 22 | | | | | | 3117 |
| POL | LIEICGHK | 150 | 8 | 10 | 16 | | | | | | 3118 |
| POL | LIEICGKK | 150 | 8 | 14 | 22 | | | | | | 3119 |
| POL | PIETVPVK | 190 | 8 | 53 | 83 | | | | | | 3120 |
| POL | ETVPVKLK | 192 | 8 | 53 | 83 | 0.0049 | 0.0001 | | | | 3121 |
| POL | GMDGPKVK | 201 | 8 | 51 | 80 | 0.0007 | 0.0004 | | | | 3122 |
| POL | PLTEEKIK | 212 | 8 | 55 | 86 | | | | | | 3123 |
| POL | EICTEMEK | 223 | 8 | 27 | 42 | | | | | | 3124 |
| POL | NTPIFAIK | 246 | 8 | 24 | 38 | | | | | | 3125 |
| POL | NTPVFAIK | 246 | 8 | 37 | 58 | 0.0003 | 0.0003 | | | | 3126 |
| POL | PIFAIKKK | 248 | 8 | 25 | 39 | | | | | | 3127 |
| POL | PVFAIKKK | 248 | 8 | 37 | 58 | 0.0003 | 0.0001 | | | | 3128 |
| POL | PAGLKKKK | 286 | 8 | 52 | 81 | | | | | | 3129 |
| POL | PLDKDFRK | 308 | 8 | 19 | 30 | | | | | | 3130 |
| POL | NVLPQGWK | 336 | 8 | 63 | 100 | 0.0003 | 0.0012 | | | | 3131 |
| POL | KILEPFRK | 355 | 8 | 23 | 36 | | | | | | 3132 |
| POL | DLEIGQIIR | 381 | 8 | 52 | 81 | | | | | | 3133 |
| POL | EIGQIIRAK | 383 | 8 | 27 | 42 | | | | | | 3134 |
| POL | EIGQIIRTK | 383 | 8 | 22 | 34 | | | | | | 3135 |
| POL | RAKIEELR | 388 | 8 | 26 | 41 | | | | | | 3136 |
| POL | RTKIEELR | 388 | 8 | 22 | 34 | | | | | | 3137 |
| POL | ELREHLLK | 393 | 8 | 17 | 27 | | | | | | 3138 |
| POL | ELRQHLLR | 393 | 8 | 15 | 23 | | | | | | 3139 |
| POL | WTVNDIQK | 441 | 8 | 62 | 97 | 0.0003 | 0.0001 | | | | 3140 |
| POL | DIQKLVGK | 445 | 8 | 62 | 97 | | | | | | 3141 |
| POL | ELELAENR | 489 | 8 | 53 | 83 | | | | | | 3142 |
| POL | GVYYDPSK | 508 | 8 | 43 | 67 | | | | | | 3143 |
| POL | DLIAEIQK | 516 | 8 | 28 | 44 | | | | | | 3144 |
| POL | QIYQEPFK | 532 | 8 | 41 | 64 | 0.0010 | 0.0013 | | | | 3145 |
| POL | GAIITNDVK | 551 | 8 | 19 | 30 | | | | | | 3146 |
| POL | SAIITNDVK | 551 | 8 | 16 | 25 | | | | | | 3147 |
| POL | TAIITNDVK | 551 | 8 | 11 | 17 | | | | | | 3148 |
| POL | QLTEAVQK | 559 | 8 | 37 | 58 | | | | | | 3149 |
| POL | QLTEVVQK | 559 | 8 | 11 | 17 | | | | | | 3150 |
| POL | ESIVIWGK | 570 | 8 | 50 | 79 | | | | | | 3151 |
| POL | VIWGKTPK | 573 | 8 | 48 | 75 | | | | | | 3152 |
| POL | KLWYQLEK | 616 | 8 | 46 | 72 | | | | | | 3153 |
| POL | YVDGAANR | 633 | 8 | 50 | 78 | 0.0003 | 0.0001 | | | | 3154 |
| POL | GAANRETK | 636 | 8 | 45 | 70 | | | | | | 3155 |
| POL | KAGYVTDR | 646 | 8 | 42 | 66 | | | | | | 3156 |
| POL | VTDRGRQK | 650 | 8 | 40 | 63 | 0.0090 | 0.0065 | | | | 3157 |
| POL | LTDTTNQK | 661 | 8 | 19 | 30 | | | | | | 3158 |
| POL | LTETTNQK | 661 | 8 | 30 | 47 | | | | | | 3159 |
| POL | IIQAQPDK | 697 | 8 | 40 | 63 | | | | | | 3160 |
| POL | IIQAQPDR | 697 | 8 | 16 | 25 | | | | | | 3161 |
| POL | QIIEQLIK | 712 | 8 | 37 | 58 | | | | | | 3162 |
| POL | IIEQLIKK | 713 | 8 | 37 | 58 | | | | | | 3163 |
| POL | LAWVPAIIK | 725 | 8 | 22 | 34 | | | | | | 3164 |
| POL | LSWVPAIIK | 725 | 8 | 37 | 58 | | | | | | 3165 |
| POL | KLVSAGIR | 742 | 8 | 16 | 25 | | | | | | 3166 |
| POL | KLVSSGIR | 742 | 8 | 29 | 45 | | | | | | 3167 |
| POL | LVSAGIRK | 743 | 8 | 16 | 25 | 0.0091 | 0.0054 | | | | 3168 |
| POL | LVSSGIRK | 743 | 8 | 27 | 42 | | | | | | 3169 |
| POL | KAQEEIIEK | 759 | 8 | 27 | 43 | | | | | | 3170 |
| POL | KAQEEIIER | 759 | 8 | 16 | 25 | | | | | | 3171 |
| POL | NLPPIVAK | 779 | 8 | 26 | 41 | | | | | | 3172 |
| POL | NLPPVVAK | 779 | 8 | 27 | 42 | | | | | | 3173 |
| POL | EIVMICDK | 787 | 8 | 45 | 70 | | | | | | 3174 |
| POL | ETAYFILK | 848 | 8 | 31 | 48 | | | | | | 3175 |
| POL | ETAYFLLK | 848 | 8 | 27 | 42 | 0.0037 | 0.0430 | | | | 3176 |
| POL | FILKLAGR | 852 | 8 | 32 | 50 | | | | | | 3177 |
| POL | FLLKLAGR | 852 | 8 | 25 | 39 | | | | | | 3178 |
| POL | LAGRWPVK | 856 | 8 | 50 | 78 | | | | | | 3179 |
| POL | UVVESMNK | 901 | 8 | 49 | 77 | | | | | | 3180 |
| POL | ESMNKELK | 904 | 8 | 53 | 83 | | | | | | 3181 |
| POL | SMNKELKK | 905 | 8 | 53 | 83 | | | | | | 3182 |
| POL | AVFIIINFK | 931 | 8 | 62 | 97 | 0.0280 | 0.0380 | | | | 3183 |
| POL | FIIINFKRK | 933 | 8 | 58 | 91 | | | | | | 3184 |
| POL | IASDIQTK | 956 | 8 | 14 | 22 | | | | | | 3185 |
| POL | IATDIQTK | 956 | 8 | 36 | 56 | | | | | | 3186 |
| POL | ELQKQIIK | 964 | 8 | 13 | 21 | | | | | | 3187 |
| POL | ELQKQITK | 964 | 8 | 35 | 56 | | | | | | 3188 |
| POL | IIKIQNFR | 969 | 8 | 12 | 19 | | | | | | 3189 |
| POL | ITKIQNFR | 969 | 8 | 36 | 57 | | | | | | 3190 |
| POL | RVYYRDSR | 976 | 8 | 58 | 91 | | | | | | 3191 |
| POL | DSRDPIWK | 981 | 8 | 35 | 55 | | | | | | 3192 |
| POL | DSRDILWK | 981 | 8 | 14 | 22 | | | | | | 3193 |
| POL | PIWKGPAK | 985 | 8 | 36 | 56 | | | | | | 3194 |
| POL | PLWKGPAK | 985 | 8 | 19 | 30 | | | | | | 3195 |
| POL | DIKVVPRR | 1009 | 8 | 48 | 75 | | | | | | 3196 |
| POL | EIKVVPRR | 1009 | 8 | 16 | 25 | | | | | | 3197 |
| POL | VVPRRKAK | 1012 | 8 | 52 | 81 | 0.0027 | 0.0001 | | | | 3198 |
| POL | VVPRRKVK | 1012 | 8 | 11 | 17 | | | | | | 3199 |
| POL | KIIKDYGK | 1019 | 8 | 11 | 17 | | | | | | 3200 |
| POL | KIIRDYGK | 1019 | 8 | 50 | 78 | | | | | | 3201 |
| POL | LAFPQGEAR | 6 | 9 | 12 | 19 | | | | | | 3202 |
| POL | LAFQQCEAR | 6 | 9 | 16 | 25 | | | | | | 3203 |
| POL | QTRANSPTR | 21 | 9 | 15 | 24 | | | | | | 3204 |
| POL | NSTNSPTSR | 31 | 9 | 01 | 33 | | | | | | 3205 |
| POL | PTSRELQVR | 36 | 9 | 01 | 33 | | | | | | 3206 |
| POL | PSSRELQVR | 39 | 9 | 01 | 50 | | | | | | 3207 |
| POL | TIKIGGQLK | 99 | 9 | 17 | 27 | 0.2700 | 0.0330 | 0.0010 | 0.0008 | 0.1100 | 3208 |
| POL | DINLPGKWK | 122 | 9 | 13 | 20 | | | | | | 3209 |
| POL | EINLPGKWK | 122 | 9 | 12 | 19 | | | | | | 3210 |
| POL | NLPGKWKPK | 124 | 9 | 36 | 56 | | | | | | 3211 |
| POL | GIGGFIKVK | 136 | 9 | 11 | 17 | | | | | | 3212 |
| POL | GIGGFIKVR | 136 | 9 | 53 | 83 | 0.0008 | 0.0005 | 0.0062 | 0.0120 | 0.0001 | 3213 |
| POL | QILIEICGK | 148 | 9 | 14 | 22 | | | | | | 3214 |
| POL | ILIEICGKK | 149 | 9 | 14 | 22 | | | | | | 3215 |
| POL | PTPVNIIGR | 166 | 9 | 54 | 84 | 0.0008 | 0.0001 | 0.0007 | 0.0120 | 0.0002 | 3216 |
| POL | CTEMEKEGK | 225 | 9 | 28 | 44 | 0.0002 | 0.0001 | 0.0006 | 0.0006 | 0.0002 | 3217 |
| POL | NTPIFAIKK | 246 | 9 | 24 | 38 | | | | | | 3218 |
| POL | NTPVFAIKK | 246 | 9 | 37 | 58 | 00330 | 0.0600 | 0.0006 | 0.0006 | 1.7000 | 3219 |
| POL | AIKKKDSTK | 251 | 9 | 57 | 89 | 0.0017 | 0.0086 | 0.0018 | 0.0005 | 0.0001 | 3220 |
| POL | LVDFRELNK | 263 | 9 | 62 | 97 | 0.0110 | 0.0300 | 0.0006 | 0.0006 | 0.0002 | 3221 |
| POL | GIPHPAGLK | 282 | 9 | 56 | 89 | 0.2300 | 0.0650 | 0.0007 | 0.0005 | 0.0110 | 3222 |
| POL | SVPLDKDFR | 306 | 9 | 18 | 28 | | | | | | 3223 |
| POL | AIFQSSMTK | 347 | 9 | 36 | 56 | 0.1000 | 0.9600 | 0.0076 | 0.0005 | 0.0230 | 3224 |
| POL | MTKILEPFR | 353 | 9 | 43 | 67 | 0.0008 | 0.0160 | 0.2200 | 0.4200 | 0.3100 | 3225 |
| POL | TTPDKKHQK | 404 | 9 | 57 | 89 | 0.0002 | 0.0042 | 0.0021 | 0.0029 | 0.0053 | 3226 |
| POL | ASQIYAGIK | 456 | 9 | 27 | 43 | 0.0013 | 0.3400 | 0.0005 | 0.0018 | 0.0001 | 3227 |
| POL | ASQIYPGIK | 456 | 9 | 28 | 44 | | | | | | 3228 |
| POL | QIYAGIKVK | 458 | 9 | 20 | 32 | | | | | | 3229 |
| POL | QIYPGIKVK | 458 | 9 | 12 | 19 | | | | | | 3230 |
| POL | QIYPGIKVR | 458 | 9 | 14 | 22 | | | | | | 3231 |
| POL | GIKVKQLCK | 462 | 9 | 28 | 44 | | | | | | 3232 |
| POL | GIKVRQLCK | 462 | 9 | 19 | 30 | | | | | | 3233 |
| POL | LAENREILK | 492 | 9 | 54 | 84 | 0.0002 | 0.0003 | 0.0004 | 0.0006 | 0.0001 | 3234 |
| POL | NLKTGKYAK | 540 | 9 | 28 | 44 | | | | | | 3235 |
| POL | NLKTGKYAR | 540 | 9 | 29 | 46 | 0.0008 | 0.0001 | 0.0130 | 0.4400 | 0.0033 | 3236 |
| POL | KTGKYAKMR | 542 | 9 | 19 | 30 | | | | | | 3237 |
| POL | KTGKYARMR | 542 | 9 | 13 | 21 | | | | | | 3238 |
| POL | RSAHTNDVK | 550 | 9 | 10 | 16 | | | | | | 3239 |
| POL | IVIWGKTPK | 572 | 9 | 48 | 75 | 0.0850 | 0.3700 | 0.9900 | 0.3000 | 0.0330 | 3240 |
| POL | FVNTPPLVK | 608 | 9 | 54 | 86 | 0.0020 | 0.0660 | 0.0009 | 0.0099 | 0.0380 | 3241 |
| POL | YVTDRGRQK | 649 | 9 | 39 | 61 | 0.0011 | 0.0010 | 0.0006 | 0.0006 | 0.0039 | 3242 |
| POL | SLTDITNQK | 660 | 9 | 11 | 17 | | | | | | 3243 |
| POL | SLTETTNQK | 660 | 9 | 21 | 33 | | | | | | 3244 |
| POL | GIIQAQPDK | 696 | 9 | 40 | 63 | 0.0009 | 0.0400 | 0.0006 | 0.0005 | 0.0003 | 3245 |
| POL | GIIQAQPDR | 696 | 9 | 16 | 25 | | | | | | 3246 |
| POL | QIIEQLIKK | 712 | 9 | 37 | 58 | 0.0091 | 0.1600 | 0.0006 | 0.0005 | 0.0120 | 3247 |
| POL | YLAWVPAIIK | 724 | 9 | 22 | 34 | 0.0770 | 0.0570 | 0.0550 | 0.8800 | 4.0000 | 3248 |
| POL | YLSWVPAIIK | 724 | 9 | 37 | 58 | | | | | | 3249 |
| POL | KLVSAGIRK | 742 | 9 | 16 | 25 | 0.1300 | 0.0770 | 0.0017 | 0.0020 | 0.0001 | 3250 |
| POL | KLVSSGIRK | 742 | 9 | 27 | 42 | | | | | | 3251 |
| POL | VLFLDGIDK | 751 | 9 | 51 | 80 | 0.0380 | 0.0320 | 0.0006 | 0.0006 | 0.0004 | 3252 |
| POL | ASCDKCQLK | 790 | 9 | 43 | 67 | 0.0027 | 0.0140 | 0.0020 | 0.0009 | 0.0001 | 3253 |
| POL | KLAGRWPVK | 855 | 9 | 50 | 78 | 2.7000 | 0.0690 | 0.2100 | 0.0006 | 0.0002 | 3254 |
| POL | AACWWAGIK | 880 | 9 | 21 | 33 | 0.0130 | 0.0470 | 0.0023 | 0.0041 | 0.0014 | 3255 |
| POL | ESMNKELKK | 904 | 9 | 53 | 83 | | | | | | 3256 |
| POL | MAVFIIINFK | 930 | 9 | 60 | 94 | 0.0170 | 0.3000 | 0.0480 | 0.0560 | 3.2000 | 3257 |
| POL | AVFIIINFKR | 931 | 9 | 62 | 97 | 0.1700 | 1.8000 | 3.5000 | 0.2700 | 1.9000 | 3258 |
| POL | IIASDIQTK | 955 | 9 | 14 | 22 | | | | | | 3259 |
| POL | IIATDIQTK | 955 | 9 | 35 | 55 | 0.0250 | 0.0980 | 0.0007 | 0.0005 | 0.0002 | 3260 |
| POL | DIQIKELQK | 959 | 9 | 46 | 72 | 0.0009 | 0.0006 | 0.0006 | 0.0018 | 0.0001 | 3261 |
| POL | QIIKIQNFR | 968 | 9 | 12 | 19 | | | | | | 3262 |
| POL | QITKIQNFR | 968 | 9 | 35 | 55 | 0.0021 | 0.0045 | 0.2400 | 0.0660 | 0.2600 | 3263 |
| POL | VIQDNSDIK | 1003 | 9 | 37 | 58 | 0.0009 | 0.0068 | 0.0006 | 0.0005 | 0.0001 | 3264 |
| POL | VIQDNSEIK | 1003 | 9 | 12 | 19 | | | | | | 3265 |
| POL | NSDIKVVPR | 1007 | 9 | 40 | 63 | | | | | | 3266 |
| POL | NSEIKVVPR | 1007 | 9 | 12 | 19 | | | | | | 3267 |
| POL | DIKVVPRRK | 1009 | 9 | 48 | 75 | 0.0002 | 0.0001 | 0.0006 | 0.0069 | 0.0065 | 3268 |
| POL | EIKVVPRRK | 1009 | 9 | 15 | 23 | | | | | | 3269 |
| POL | KVVPRRKAK | 1010 | 9 | 52 | 81 | 0.0290 | 0.0039 | 0.3100 | 0.0008 | 0.0002 | 3270 |
| POL | KVVPRRKVK | 1011 | 9 | 11 | 17 | | | | | | 3271 |
| POL | NLAFPQGEAR | 5 | 10 | 10 | 16 | | | | | | 3272 |
| POL | NLAFQQGEAR | 5 | 10 | 16 | 25 | | | | | | 3273 |
| POL | QTRANSPTRR | 21 | 10 | 11 | 18 | | | | | | 3274 |
| POL | QTRANSPTSR | 21 | 10 | 12 | 19 | | | | | | 3275 |
| POL | PSRANSPTSR | 24 | 10 | 01 | 50 | | | | | | 3276 |
| POL | QTRANSPSSR | 33 | 10 | 01 | 33 | | | | | | 3277 |
| POL | QTRANSPTTR | 35 | 10 | 01 | 33 | | | | | | 3278 |
| POL | VTIKIGGQLK | 98 | 10 | 17 | 27 | 0.0370 | 0.2100 | 0.0017 | 0.0025 | 0.0640 | 3279 |
| POL | VLEDINLPGK | 119 | 10 | 13 | 20 | | | | | | 3280 |
| POL | VLEEINLPGK | 119 | 10 | 12 | 19 | | | | | | 3281 |
| POL | MIGGIGGFIK | 133 | 10 | 62 | 97 | 0.0099 | 0.0550 | 0.0052 | 0.0012 | 0.3100 | 3282 |
| POL | QILIEICGKK | 148 | 10 | 14 | 22 | | | | | | 3283 |
| POL | ISPIETVPVK | 188 | 10 | 53 | 83 | 0.0003 | 0.0310 | 0.0017 | 0.0025 | 0.0001 | 3284 |
| POL | PIETVPVKLK | 190 | 10 | 53 | 83 | 0.0002 | 0.0001 | 0.0009 | 0.0009 | 0.0003 | 3285 |
| POL | KLKPGMDGPK | 197 | 10 | 49 | 77 | 0.3900 | 0.0760 | | | | 3286 |
| POL | LVEICTEMEK | 221 | 10 | 15 | 24 | 0.0002 | 0.0120 | 0.0001 | 0.0013 | 0.0024 | 3287 |
| POL | EMEKEGKISK | 229 | 10 | 33 | 52 | 0.0004 | 0.0001 | 0.0009 | 0.0009 | 0.0003 | 3288 |
| POL | NTPIFAIKKK | 246 | 10 | 24 | 38 | | | | | | 3289 |
| POL | NTPVFAIKKK | 246 | 10 | 37 | 58 | 0.0006 | 0.0046 | | | | 3290 |
| POL | FAIKKKDSTK | 250 | 10 | 57 | 89 | 0.0004 | 0.0002 | | | | 3291 |
| POL | KLVDFRELNK | 262 | 10 | 62 | 97 | 0.5100 | 0.0900 | | | | 3292 |
| POL | LVDFRELNKR | 263 | 10 | 60 | 94 | | | | | | 3293 |
| POL | GIPHPAGLKK | 282 | 10 | 54 | 86 | 0.0110 | 0.1700 | 0.0009 | 0.0009 | 0.0007 | 3294 |
| POL | DAYFSVPLDK | 302 | 10 | 21 | 33 | | | | | | 3295 |
| POL | FSVPLDKDFR | 305 | 10 | 18 | 28 | | | | | | 3296 |
| POL | SVPLDKIWRK | 306 | 10 | 8 | 28 | | | | | | 3297 |
| POL | SINNETPGIR | 323 | 10 | 32 | 50 | | | | | | 3298 |
| POL | STNNETPGIR | 323 | 10 | 11 | 17 | | | | | | 3299 |
| POL | PAIFQSSMTK | 346 | 10 | 36 | 56 | 0.0760 | 0.0830 | 0.0017 | 0.0025 | 0.0046 | 3300 |
| POL | SMTKILEPFR | 352 | 10 | 42 | 66 | 0.0004 | 0.0004 | | | | 3301 |
| POL | MTKILEPFRK | 353 | 10 | 22 | 34 | 0.0150 | 0.0380 | 0.0150 | 0.0060 | 0.1100 | 3302 |
| POL | GSDLEIGQHR | 379 | 10 | 52 | 81 | | | | | | 3303 |
| POL | DLEIGQIIRAK | 381 | 10 | 27 | 42 | | | | | | 3304 |
| POL | DLEIGQIIRTK | 381 | 10 | 21 | 33 | | | | | | 3305 |
| POL | FTTPDKKIIQK | 403 | 10 | 51 | 80 | 0.0002 | 0.0150 | 0.0010 | 0.0013 | 0.0273 | 3306 |
| POL | WMGYELIIPDK | 418 | 10 | 60 | 94 | 0.0005 | 0.0004 | 0.0009 | 0.0006 | 0.0003 | 3307 |
| POL | TVQPIQLPEK | 429 | 10 | 17 | 27 | | | | | | 3308 |
| POL | TVQPIVLPEK | 429 | 10 | 13 | 20 | 0.1600 | 5.6000 | | | | 3309 |
| POL | DSWTVNDIQK | 439 | 10 | 43 | 67 | 0.0007 | 0.002 | | | | 3310 |
| POL | ESWTVNDIQK | 439 | 10 | 11 | 17 | | | | | | 3311 |
| POL | WASQIVAGIK | 455 | 10 | 27 | 42 | | | | | | 3312 |
| POL | WASQIYPGIK | 455 | 10 | 28 | 44 | | | | | | 3313 |
| POL | KVKQLCKLLR | 464 | 10 | 27 | 42 | | | | | | 3314 |
| POL | KVRQLCKLLR | 464 | 10 | 19 | 30 | | | | | | 3315 |
| POL | QLCKLLRGAK | 467 | 10 | 25 | 39 | | | | | | 3316 |
| POL | QLCKLLRGTK | 467 | 10 | 21 | 33 | | | | | | 3317 |
| POL | EAELELAENR | 487 | 10 | 53 | 83 | | | | | | 3318 |
| POL | ELAENREILK | 491 | 10 | 54 | 84 | 0.0002 | 0.0003 | | | | 3319 |
| POL | ATESIVIWGK | 568 | 10 | 19 | 30 | | | | | | 3320 |
| POL | SIVIWGKTPK | 571 | 10 | 42 | 66 | | | | | | 3321 |
| POL | VIWGKTPKFK | 573 | 10 | 17 | 27 | | | | | | 3322 |
| POL | VIWGKTPKFR | 573 | 10 | 29 | 45 | | | | | | 3323 |
| POL | LVKLWYQLEK | 614 | 10 | 46 | 72 | 0.0560 | 0.0820 | 0.0075 | 0.0081 | 0.0097 | 3324 |
| POL | AANRETKLGK | 637 | 10 | 30 | 47 | 0.0007 | 0.0016 | | | | 3325 |
| POL | KAGYVIDRGR | 646 | 10 | 39 | 61 | | | | | | 3326 |
| POL | VSLTDTTNQK | 659 | 10 | 10 | 16 | | | | | | 3327 |
| POL | VSLTETTNQK | 659 | 10 | 20 | 31 | | | | | | 3328 |
| POL | VSQIIEQLIK | 710 | 10 | 19 | 30 | 0.0007 | 0.0370 | 0.0017 | 0.0025 | 0.0007 | 3329 |
| POL | IIEQLIKKEK | 713 | 10 | 30 | 47 | 0.0004 | 0.0003 | 0.0009 | 0.0008 | 0.0003 | 3330 |
| POL | GIGGNEQVDK | 733 | 10 | 58 | 91 | 0.0005 | 0.0001 | 0.0009 | 0.0009 | 0.0003 | 3331 |
| POL | KVLFLDGIDK | 750 | 10 | 48 | 75 | 0.3600 | 0.7800 | | | | 3332 |
| POL | VASCDKCQLK | 789 | 10 | 43 | 67 | 0.0004 | 0.0004 | | | | 3333 |
| POL | QLDCTHLEGK | 814 | 10 | 60 | 95 | 0.0010 | 0.0003 | | | | 3334 |
| POL | GSNFTSAAVK | 870 | 10 | 26 | 41 | | | | | | 3335 |
| POL | GSNFTSTTVK | 870 | 10 | 11 | 17 | | | | | | 3336 |
| POL | KAACWWAGIK | 879 | 10 | 20 | 32 | 0.0300 | 0.0740 | 0.0017 | 0.00250 | 0.0002 | 3337 |
| POL | VVESMNKELK | 902 | 10 | 48 | 75 | | | | | | 3338 |
| POL | ELKKIIGQVR | 909 | 10 | 56 | 88 | | | | | | 3339 |
| POL | QVRDQAEHLK | 916 | 10 | 44 | 69 | 0.0089 | 0.0093 | | | | 3340 |
| POL | QVREQAEHLK | 916 | 10 | 13 | 20 | | | | | | 3341 |
| POL | QMAVFIHNFK | 929 | 10 | 60 | 94 | 0.6100 | 0.6400 | 0.0240 | 0.0083 | 0.0610 | 3342 |
| POL | MAVFIHNFKR | 930 | 10 | 60 | 94 | 0.0068 | 0.0083 | | | | 3343 |
| POL | AVFIHNFKRK | 931 | 10 | 58 | 91 | 0.6600 | 0.8500 | | | | 3344 |
| POL | GIGGYSAGER | 942 | 10 | 58 | 91 | 0.0003 | 0.0001 | 0.00010 | 0.0029 | 0.0003 | 3345 |
| POL | DIIASDIQTK | 954 | 10 | 14 | 22 | | | | | | 3346 |
| POL | DIIATDIQTK | 954 | 10 | 34 | 53 | 0.0056 | 0.0130 | 0.0017 | 0.0025 | 0.0170 | 3347 |
| POL | KIQNFRVYYR | 971 | 10 | 52 | 81 | 0.0320 | 0.2100 | 6.6000 | 0.0850 | 0.0380 | 3348 |
| POL | VVIQDNSDIK | 1002 | 10 | 37 | 58 | 0.0005 | 0.0210 | 0.0010 | 0.0013 | 0.0018 | 3349 |
| POL | VVIQDNSEIK | 1002 | 10 | 12 | 19 | | | | | | 3350 |
| POL | NSDIKVVPRR | 1007 | 10 | 40 | 63 | 0.0007 | 0.0001 | | | | 3351 |
| POL | NSEIKVVPRR | 1007 | 10 | 12 | 19 | | | | | | 3352 |
| POL | KAKIIRDYGK | 1017 | 10 | 41 | 64 | 0.0048 | 0.0018 | | | | 3353 |
| POL | MAGDDCVAGR | 1028 | 10 | 24 | 38 | | | | | | 3354 |
| POL | MAGDLICVASR | 1028 | 10 | 19 | 30 | | | | | | 3355 |
| POL | NSPTSRELQVR | 34 | 11 | 01 | 33 | | | | | | 3356 |
| POL | NSPSSRELQVR | 37 | 11 | 01 | 50 | | | | | | 3357 |
| POL | NSPTTRELQVR | 39 | 11 | 01 | 50 | | | | | | 3358 |
| POL | FSFPQITLWQR | 85 | 11 | 14 | 22 | | | | | | 3359 |
| POL | TLWQRPLVTIK | 91 | 11 | 17 | 27 | | | | | | 3360 |
| POL | TLWQRPLVTVK | 91 | 11 | 13 | 20 | | | | | | 3361 |
| POL | LVTIKIGGQLK | 97 | 11 | 13 | 20 | | | | | | 3362 |
| POL | TVLEDINLPGK | 118 | 11 | 13 | 20 | | | | | | 3363 |
| POL | TVLEEINLPGK | 118 | 11 | 12 | 19 | | | | | | 3364 |
| POL | DINLPGKWKPK | 122 | 11 | 13 | 20 | | | | | | 3365 |
| POL | EINLPGKWKPK | 122 | 11 | 12 | 19 | | | | | | 3166 |
| POL | KMIGGIGGFIK | 132 | 11 | 62 | 97 | 2.3000 | 0.7000 | | | | 3367 |
| POL | PISPIETVPVK | 187 | 11 | 53 | 83 | | | | | | 3368 |
| POL | KVKQWPLTEEK | 207 | 11 | 46 | 72 | 0.0750 | 0.0330 | | | | 3369 |
| POL | ALVEICTEMEK | 220 | 11 | 15 | 23 | | | | | | 3370 |
| POL | EICTEMEKEGK | 223 | 11 | 27 | 42 | | | | | | 3371 |
| POL | AIKKKDSTKWR | 251 | 11 | 57 | 89 | | | | | | 3372 |
| POL | STKWRKLVDFR | 257 | 11 | 58 | 91 | | | | | | 3373 |
| POL | KLVDFRELNKR | 262 | 11 | 60 | 94 | | | | | | 3374 |
| POL | QLGIPIIPAGLK | 280 | 11 | 56 | 89 | | | | | | 3375 |
| POL | GIPIIPAGLKKK | 282 | 11 | 53 | 84 | | | | | | 3376 |
| POL | FSVPLDKDFRK | 305 | 11 | 18 | 28 | | | | | | 3377 |
| POL | PSINNETPGIR | 322 | 11 | 31 | 48 | | | | | | 3378 |
| POL | PSTNNETPGIR | 322 | 11 | 11 | 17 | | | | | | 3379 |
| POL | SSMTKILEPFR | 351 | 11 | 32 | 50 | | | | | | 3380 |
| POL | SMTKILEPFRK | 352 | 11 | 22 | 34 | | | | | | 3381 |
| POL | KIEELREIILLK | 390 | 11 | 13 | 20 | | | | | | 3382 |
| POL | KIEELRQIILLR | 390 | 11 | 15 | 23 | | | | | | 3383 |
| POL | LLKWGFTTPDK | 398 | 11 | 23 | 36 | | | | | | 3384 |
| POL | LLRWGFTTPDK | 398 | 11 | 23 | 36 | | | | | | 3385 |
| POL | WTVQPIQLPEK | 428 | 11 | 17 | 27 | | | | | | 3386 |
| POL | WTVQPIVLPEK | 428 | 11 | 13 | 20 | 0.0011 | 0.0510 | | | | 3387 |
| POL | TVNDIQKLVGK | 442 | 11 | 61 | 95 | 0.0400 | 0.1700 | | | | 3388 |
| POL | ASQIYAGIKVK | 456 | 11 | 20 | 32 | | | | | | 3389 |
| POL | ASQIYPGIKVK | 456 | 11 | 12 | 19 | | | | | | 3390 |
| POL | ASQIYPGIKVR | 456 | 11 | 14 | 22 | | | | | | 3391 |
| POL | YAGIKVKQLCK | 460 | 11 | 18 | 28 | | | | | | 3392 |
| POL | PVIIGVYYDPSK | 505 | 11 | 39 | 61 | | | | | | 3393 |
| POL | PSKDLIAEIQK | 513 | 11 | 25 | 39 | | | | | | 3394 |
| POL | WTYQIYQEPFK | 529 | 11 | 40 | 63 | 0.9200 | 0.0540 | | | | 3395 |
| POL | QIYQEPPKNLK | 532 | 11 | 40 | 63 | 0.2800 | 0.2900 | | | | 3396 |
| POL | NLKTGKYAKMR | 540 | 11 | 15 | 29 | | | | | | 3397 |
| POL | NLKTGKYARMR | 540 | 11 | 13 | 21 | | | | | | 3398 |
| POL | RMRGAHTNDVK | 548 | 11 | 12 | 19 | | | | | | 3399 |
| POL | DVKQLTEAVQK | 556 | 11 | 33 | 52 | 0.0048 | 0.0240 | | | | 3400 |
| POL | IATESIVIWGK | 567 | 11 | 14 | 22 | | | | | | 3401 |
| POL | ESIVIWGKTPK | 570 | 11 | 41 | 65 | | | | | | 3402 |
| POL | IVIWGKTPKFK | 572 | 11 | 17 | 27 | | | | | | 3403 |
| POL | IVIWGKTPKFR | 572 | 11 | 29 | 45 | | | | | | 3404 |
| POL | KTPKFKLPIQK | 577 | 11 | 14 | 22 | | | | | | 3405 |
| POL | KTPKFRLPIQK | 577 | 11 | 22 | 34 | | | | | | 3406 |
| POL | PLVKLWYQLEK | 613 | 11 | 45 | 70 | | | | | | 3407 |
| POL | ETFYVDGAANR | 630 | 11 | 43 | 67 | | | | | | 3408 |
| POL | YVDGAANRETK | 633 | 11 | 44 | 69 | | | | | | 3409 |
| POL | GAANRETKLGK | 636 | 11 | 30 | 47 | | | | | | 3410 |
| POL | KLGKAGYVTDR | 643 | 11 | 24 | 38 | | | | | | 3411 |
| POL | VVSLTDTINQK | 658 | 11 | 10 | 16 | | | | | | 3412 |
| POL | VVSLTEKTTNQK | 658 | 11 | 11 | 17 | | | | | | 3413 |
| POL | ALGIIQAQPDK | 694 | 11 | 39 | 61 | | | | | | 3414 |
| POL | ALGIIQAQPDR | 694 | 11 | 15 | 23 | | | | | | 3415 |
| POL | LVNQIIEQLIK | 709 | 11 | 15 | 23 | | | | | | 3416 |
| POL | LVSQIIEQLIK | 709 | 11 | 15 | 28 | | | | | | 3417 |
| POL | VSQIIEQLIKK | 710 | 11 | 19 | 30 | | | | | | 3418 |
| POL | QIIEQIIKKEK | 712 | 11 | 30 | 47 | | | | | | 3419 |
| POL | KVYLAWVPAIIK | 722 | 11 | 20 | 32 | 8.6000 | 2.3000 | | | | 3420 |
| POL | KVYLSWVPAIIK | 722 | 11 | 23 | 37 | | | | | | 3421 |
| POL | QVDKLVSAGIR | 739 | 11 | 15 | 23 | | | | | | 3422 |
| POL | QVDKLVSSGIR | 739 | 11 | 29 | 45 | | | | | | 3423 |
| POL | GIDKAQEEHEK | 756 | 11 | 25 | 39 | | | | | | 3424 |
| POL | GIDKAQEEHER | 756 | 11 | 14 | 22 | | | | | | 3425 |
| POL | VAKEIVASCDK | 784 | 11 | 45 | 71 | | | | | | 3426 |
| POL | IVASCDKCQLK | 788 | 11 | 43 | 67 | 0.0970 | 0.1000 | | | | 3427 |
| POL | TAYFILKLAGR | 849 | 11 | 31 | 48 | | | | | | 3428 |
| POL | TAYFLLKLAGR | 849 | 11 | 24 | 38 | | | | | | 3429 |
| POL | ILKLAGRWPVK | 853 | 11 | 30 | 47 | | | | | | 3430 |
| POL | LLKLAGRWPVK | 853 | 11 | 20 | 31 | | | | | | 3431 |
| POL | QSQGVVESMNK | 898 | 11 | 49 | 77 | | | | | | 3432 |
| POL | GVVESMNKELK | 901 | 11 | 48 | 75 | | | | | | 3433 |
| POL | VVESMNKELKK | 902 | 11 | 48 | 75 | | | | | | 3434 |
| POL | QMAVFIIINFKR | 929 | 11 | 60 | 94 | | | | | | 3435 |
| POL | MAVFIIINFKRK | 930 | 11 | 57 | 89 | | | | | | 3436 |
| POL | ASDIQTKELQK | 957 | 11 | 11 | 17 | | | | | | 3437 |
| POL | ATDIQTKELQK | 957 | 11 | 35 | 55 | 0.0051 | 0.1800 | | | | 3438 |
| POL | QTKELQKQIIK | 961 | 11 | 10 | 16 | | | | | | 3439 |
| POL | QTKELQKQITK | 961 | 11 | 32 | 50 | 0.0050 | 0.0100 | | | | 3440 |
| POL | AVVIQDNSDIK | 1000 | 11 | 37 | 58 | 0.0004 | 0.0150 | | | | 3441 |
| POL | AVVIQDNSEIK | 1000 | 11 | 12 | 19 | | | | | | 3442 |
| POL | NSDIKVVPRRK | 1007 | 11 | 40 | 63 | | | | | | 3443 |
| POL | NSEIKVVPRRK | 1007 | 11 | 11 | 17 | | | | | | 3444 |
| POL | DIKVVFRRKAK | 1009 | 11 | 39 | 61 | | | | | | 3445 |
| POL | EIKVVPRRKAK | 1009 | 11 | 13 | 20 | | | | | | 3446 |
| POL | VVPRRKAKIIR | 1012 | 11 | 42 | 66 | | | | | | 3447 |
| POL | QMAGDDCVAGR | 1027 | 11 | 24 | 38 | | | | | | 3448 |
| POL | QMAGDDCVASR | 1027 | 11 | 19 | 30 | | | | | | 3449 |
| REV | DSDEELLK | 7 | 8 | 12 | 19 | | | | | | 3450 |
| REV | QARKNRRR | 40 | 8 | 17 | 27 | | | | | | 3451 |
| REV | QARRNRRR | 40 | 8 | 38 | 59 | | | | | | 3452 |
| REV | RARQRQIR | 50 | 8 | 12 | 19 | | | | | | 3453 |
| REV | ILSTCLGR | 63 | 8 | 12 | 19 | | | | | | 3454 |
| REV | GTETGVGR | 103 | 8 | 06 | 19 | | | | | | 3455 |
| REV | LLKTVRLIK | 12 | 9 | 10 | 16 | | | | | | 3456 |
| REV | GTRQARKNR | 36 | 9 | 15 | 23 | | | | | | 3457 |
| REV | GTRQARRNR | 36 | 9 | 34 | 53 | | | | | | 3458 |
| REV | GTRQTRKNR | 37 | 9 | 01 | 50 | | | | | | 3459 |
| REV | TTRQARRNR | 37 | 9 | 01 | 50 | | | | | | 3460 |
| REV | QARKNRRRR | 40 | 9 | 16 | 25 | | | | | | 3461 |
| REV | QARRNRRRR | 40 | 9 | 38 | 59 | | | | | | 3462 |
| REV | RILSTCLGR | 62 | 9 | 12 | 19 | | | | | | 3463 |
| REV | PLQLPPIER | 76 | 9 | 11 | 17 | | | | | | 3464 |
| REV | PLQLPPLER | 76 | 9 | 35 | 55 | | | | | | 3465 |
| REV | PSPEGTRQAR | 31 | 10 | 13 | 20 | | | | | | 3466 |
| REV | GTRQARKNRR | 36 | 10 | 15 | 23 | | | | | | 3467 |
| REV | GTRQARRNRR | 36 | 10 | 34 | 53 | | | | | | 3468 |
| REV | TTRQARTNRR | 37 | 10 | 01 | 50 | | | | | | 3469 |
| REV | TTRQARRNRR | 37 | 10 | 01 | 50 | | | | | | 3470 |
| REV | RSGDSDEELLK | 4 | 11 | 11 | 17 | | | | | | 3471 |
| REV | PSPEGTRQARR | 31 | 11 | 13 | 20 | | | | | | 3472 |
| REV | GTRQARRNRRR | 36 | 11 | 14 | 22 | | | | | | 3473 |
| REV | GTRQARRNRRR | 36 | 11 | 34 | 53 | | | | | | 3474 |
| REV | GTRQTRKNRRR | 37 | 11 | 01 | 50 | | | | | | 3475 |
| REV | TTRQARRNRRR | 37 | 11 | 01 | 50 | | | | | | 3476 |
| REV | QARKNRRRRWR | 40 | 11 | 16 | 25 | | | | | | 3477 |
| REV | QARRNRRRRWR | 40 | 11 | 37 | 58 | | | | | | 3478 |
| REV | PVPLQLPPIER | 74 | 11 | 11 | 17 | | | | | | 3479 |
| REV | PVPLQLPPLER | 74 | 11 | 34 | 53 | | | | | | 3480 |
| TAT | GLGISYGR | 45 | 8 | 55 | 87 | | | | | | 3410 |
| TAT | GISYGRKK | 47 | 8 | 58 | 91 | | | | | | 3482 |
| TAT | ISYGRKKR | 48 | 8 | 58 | 91 | | | | | | 3483 |
| TAT | PTGPKESK | 88 | 8 | 20 | 31 | | | | | | 3484 |
| TAT | TACNNCYCK | 23 | 9 | 17 | 27 | | | | | | 3485 |
| TAT | TACTNCYCK | 23 | 9 | 10 | 16 | | | | | | 3486 |
| TAT | GLGISYGRK | 45 | 9 | 55 | 87 | 0.0340 | 0.0006 | 0.0017 | 0.0020 | 0.0001 | 3487 |
| TAT | GISYGRKKR | 47 | 9 | 57 | 89 | 0.0008 | 0.0005 | 0.0018 | 0.0014 | 0.0001 | 3488 |
| TAT | ISYGRKKRR | 48 | 9 | 46 | 72 | 0.0008 | 0.0005 | 0.3900 | 0.1300 | 0.0032 | 3489 |
| TAT | PTGPKESKK | 88 | 9 | 18 | 28 | | | | | | 3490 |
| TAT | ESKKKVESK | 93 | 9 | 12 | 19 | | | | | | 3491 |
| TAT | PVDPRLEPWK | 3 | 10 | 11 | 17 | 0.0008 | 0.0001 | | | | 3492 |
| TAT | TACNNCYCKK | 23 | 10 | 11 | 17 | | | | | | 3493 |
| TAT | GLGISYGRKK | 45 | 10 | 55 | 87 | | | | | | 3494 |
| TAT | GISYGRKKRR | 47 | 10 | 45 | 70 | 0.0003 | 0.0001 | | | | 3495 |
| TAT | PTGPKESKKK | 88 | 10 | 12 | 19 | | | | | | 3496 |
| TAT | KAGPGGYPRR | 101 | 10 | 01 | 50 | | | | | | 3497 |
| TAT | GLGISYGRKKR | 45 | 11 | 54 | 86 | | | | | | 3498 |
| TAT | ISYGRKKRRQR | 48 | 11 | 39 | 61 | | | | | | 3499 |
| TAT | KAGPGGYPRRK | 101 | 11 | 01 | 50 | | | | | | 3500 |
| VIP | LIVWQVDR | 8 | 8 | 10 | 16 | | | | | | 3501 |
| VIP | MIVWQVDR | 8 | 8 | 46 | 72 | | | | | | 3502 |
| VIP | QVDRMKIR | 12 | 8 | 13 | 20 | | | | | | 3503 |
| VIP | QVDRMRIR | 12 | 8 | 34 | 53 | | | | | | 3504 |
| VIP | RMRINTWK | 15 | 8 | 10 | 16 | | | | | | 3505 |
| VIP | RMRIRTWK | 15 | 8 | 15 | 23 | | | | | | 3506 |
| VIP | RTWKSLVK | 19 | 8 | 15 | 23 | | | | | | 3507 |
| VIP | RTWNSLVK | 19 | 8 | 27 | 42 | | | | | | 3508 |
| VIP | HIPLGDAR | 56 | 8 | 13 | 20 | | | | | | 3509 |
| VIP | HIPLGEAR | 56 | 8 | 20 | 31 | | | | | | 3510 |
| VIP | GVSIEWRK | 87 | 8 | 16 | 25 | | | | | | 3511 |
| VIP | VSIEWRLR | 88 | 8 | 15 | 23 | | | | | | 3512 |
| VIP | SIEWRLRP | 89 | 8 | 11 | 17 | | | | | | 3513 |
| VIP | FSDSAIRK | 120 | 8 | 13 | 20 | | | | | | 3514 |
| VIP | FSESAIRK | 120 | 8 | 14 | 22 | | | | | | 3515 |
| VIP | SLQYLALK | 149 | 8 | 13 | 20 | | | | | | 3516 |
| VIP | LALTALIK | 153 | 8 | 16 | 25 | | | | | | 3517 |
| VIP | LTALIKPK | 155 | 8 | 13 | 20 | | | | | | 3518 |
| VIP | TALIKPKK | 156 | 8 | 11 | 17 | | | | | | 3519 |
| VIP | LIKPKKIK | 158 | 8 | 10 | 16 | | | | | | 3520 |
| VIP | LTEDRWNK | 178 | 8 | 31 | 48 | 0.0003 | 0.0045 | | | | 3521 |
| VIP | LVEDRWNK | 178 | 8 | 11 | 17 | | | | | | 3522 |
| VIP | VMIVWQVDR | 7 | 9 | 44 | 69 | 0.0034 | 0.0220 | 4.8000 | 5.5000 | 0.0010 | 3523 |
| VIP | IVWQVDRMK | 9 | 9 | 12 | 19 | | | | | | 3524 |
| VIP | IVWQVDRMR | 9 | 9 | 47 | 73 | 0.0008 | 0.0007 | 0.4500 | 0.5600 | 0.0048 | 3525 |
| VIP | GVSIEWRLR | 87 | 9 | 14 | 22 | | | | | | 3526 |
| VIP | VSIEWRLRR | 88 | 9 | 11 | 17 | | | | | | 3527 |
| VIP | GSLQYLALK | 148 | 9 | 13 | 20 | | | | | | 3528 |
| VIP | YLALTALIK | 152 | 9 | 16 | 25 | | | | | | 3529 |
| VIP | ALTALIKPK | 154 | 9 | 13 | 20 | | | | | | 3530 |
| VIP | LTALIKPKK | 155 | 9 | 11 | 17 | | | | | | 3531 |
| VIP | ALIKPKKIK | 157 | 9 | 10 | 16 | | | | | | 3532 |
| VIP | SVKKLTEDR | 174 | 9 | 13 | 20 | | | | | | 3533 |
| VIP | KLTEERWNK | 177 | 9 | 29 | 45 | 0.0130 | 0.2700 | 0.0680 | 0.0006 | 0.0002 | 3534 |
| VIP | KLVEDRWNK | 177 | 9 | 11 | 17 | | | | | | 3535 |
| VIP | QVMIVWQVDR | 6 | 10 | 43 | 67 | | | | | | 3536 |
| VIP | MIVWQVDRMR | 8 | 10 | 43 | 67 | 0.0062 | 0.0001 | | | | 3537 |
| VIP | KIRTWNSLVK | 17 | 10 | 12 | 19 | | | | | | 3538 |
| VIP | RIRTWKSLVK | 17 | 10 | 15 | 23 | | | | | | 3539 |
| VIP | RIRTWNSLVK | 17 | 10 | 15 | 23 | | | | | | 3540 |
| VIP | LVKHHMYVSK | 24 | 10 | 12 | 19 | | | | | | 3541 |
| VIP | EVHIPLGDAR | 54 | 10 | 13 | 20 | | | | | | 3542 |
| VIP | EVHIPLGEAR | 54 | 10 | 20 | 31 | | | | | | 3543 |
| VIP | GVSIEWRLRR | 87 | 10 | 10 | 16 | | | | | | 3544 |
| VIP | LALTALIKPK | 153 | 10 | 13 | 20 | | | | | | 3545 |
| VIP | ALTALIKPKK | 154 | 10 | 33 | 17 | | | | | | 3546 |
| VIP | PSVKKLTEDR | 173 | 10 | 13 | 20 | | | | | | 3547 |
| VIP | VMIVWQVDRMR | 7 | 11 | 41 | 64 | | | | | | 3548 |
| VIP | IVWQVDRMKIR | 9 | 11 | 12 | 19 | | | | | | 3549 |
| VIP | IVWQVDRMRIR | 9 | 11 | 33 | 52 | | | | | | 3550 |
| VIP | QVDRMRINTWK | 12 | 33 | 10 | 16 | | | | | | 3551 |
| VIP | QVDRMRIRTWK | 12 | 11 | 14 | 22 | | | | | | 3552 |
| VIP | SLVKHHMYVSK | 23 | 11 | 12 | 19 | | | | | | 3553 |
| VIP | LVKHHMYVSKK | 24 | 11 | 12 | 19 | | | | | | 3554 |
| VIP | TTYWGLHTGER | 69 | 11 | 22 | 34 | | | | | | 3555 |
| VIP | HLGHGVSIEWR | 83 | 11 | 22 | 34 | | | | | | 3556 |
| VIP | HLGQGVSIEWR | 83 | 11 | 25 | 39 | | | | | | 3557 |
| VIP | YLALTALIKPK | 152 | 11 | 13 | 20 | | | | | | 3558 |
| VIP | LALTALIKPKK | 153 | 11 | 11 | 17 | | | | | | 3559 |
| VIP | LTEDRWNKPQK | 178 | 33 | 21 | 33 | 0.0390 | 0.0130 | | | | 3560 |
| VIP | LVEDRWNKPQK | 178 | 11 | 10 | 16 | | | | | | 3561 |
| VPR | ELKNEAVR | 25 | 8 | 17 | 27 | | | | | | 3562 |
| VPR | ELKSEAVR | 25 | 8 | 16 | 25 | | | | | | 3563 |
| VPR | EAVRIIFPR | 29 | 8 | 59 | 92 | | | | | | 3564 |
| VPR | QLLFIIIPR | 66 | 8 | 44 | 69 | | | | | | 3565 |
| VPR | QLLFVIIFR | 66 | 8 | 10 | 16 | | | | | | 3566 |
| VPR | RIGCQIISR | 74 | 8 | 47 | 73 | | | | | | 3567 |
| VPR | RIGCRIISR | 74 | 8 | 12 | 19 | | | | | | 3568 |
| VPR | IISRIGIIR | 79 | 8 | 10 | 16 | | | | | | 3569 |
| VPR | IISRIGITR | 79 | 8 | 33 | 17 | | | | | | 3570 |
| VPR | RIGITRQR | 81 | 8 | 30 | 16 | | | | | | 3571 |
| VPR | #LPGRRGR | 85 | 8 | 03 | 50 | | | | | | 3572 |
| VPR | NIRGRRVR | 85 | 8 | 03 | 50 | | | | | | 3573 |
| VPR | RARNGASR | 93 | 8 | 39 | 30 | | | | | | 3574 |
| VPR | ALELLEELK | 39 | 9 | 30 | 16 | | | | | | 3575 |
| VPR | TLELLEELK | 39 | 9 | 44 | 69 | | | | | | 3576 |
| VPR | WAGVEAIIR | 54 | 9 | 16 | 25 | | | | | | 3577 |
| VPR | FIHFRIGCR | 69 | 9 | 11 | 37 | | | | | | 3578 |
| VPR | RIGITRQRR | 83 | 9 | 30 | 36 | | | | | | 3579 |
| VPR | QAPEDQGPQR | 3 | 30 | 39 | 62 | | | | | | 3580 |
| VPR | WALELLEELK | 18 | 10 | 09 | 35 | | | | | | 3581 |
| VPR | WTLELLEELK | 18 | 10 | 42 | 69 | | | | | | 3582 |
| VPR | KSEAVRHPPR | 27 | 30 | 34 | 22 | | | | | | 3583 |
| VPR | HSRIGITRQR | 79 | 30 | 30 | 36 | | | | | | 3584 |
| VPR | LLEELKNEAVR | 22 | 33 | 37 | 27 | | | | | | 3585 |
| VPR | LLEELKSEAVR | 22 | 33 | 36 | 25 | | | | | | 3586 |
| VPR | DTWAGVEAIIR | 52 | 33 | 36 | 25 | | | | | | 3587 |
| VPR | DTWEGVEAIIR | 52 | 33 | 38 | 28 | | | | | | 3588 |
| VPR | ILQQLLFIHPR | 63 | 11 | 35 | 55 | | | | | | 3589 |
| VPR | LLFIHFRIGCR | 67 | 33 | 11 | 37 | | | | | | 3590 |
| VPR | HSRIGITRQRR | 79 | 11 | 30 | 36 | | | | | | 3591 |
| VPU | TIVFIEYR | 35 | 8 | 10 | 36 | | | | | | 3592 |
| VPU | IYFIEYRK | 36 | 8 | 32 | 39 | | | | | | 3593 |
| VPU | LVQRKQDR | 43 | 8 | 03 | 50 | | | | | | 3594 |
| VPU | KIDRLIDR | 52 | 8 | 15 | 23 | | | | | | 3595 |
| VPU | LIDRIRER | 58 | 8 | 14 | 22 | | | | | | 3596 |
| VPU | VTLLSSSK | 94 | 8 | 01 | 50 | | | | | | 3597 |
| VPU | WTIVFIEYR | 34 | 9 | 10 | 16 | | | | | | 3598 |
| VPU | LVQRKQDRR | 43 | 9 | 01 | 50 | | | | | | 3599 |
| VPU | ILRQRKIDR | 46 | 9 | 15 | 23 | | | | | | 3600 |
| VPU | RLIDRIRER | 56 | 9 | 10 | 16 | | | | | | 3601 |
| VPU | LVTLLSSSK | 91 | 9 | 01 | 50 | | | | | | 3602 |
| VPU | KILRQRKIDR | 45 | 10 | 15 | 23 | 0.0039 | 0.0001 | | | | 3603 |
| VPU | KIDRLIDRIR | 52 | 30 | 30 | 36 | | | | | | 3604 |
| VPU | VVWTIVFIEYR | 31 | 11 | 30 | 16 | | | | | | 3605 |

[0390] TABLE X
HIV A24 Super Motif Peptides with Binding Information

| | | | | | | | |
|---|---|---|---|---|---|---|---|
| | | | No. of | Sequence | Conservancy | | |
| Protein | Sequence | Position | Aminio Acids | Frequency | (%) | A*2401 | SEQ ID NO |

| | | | | | | | |
|---|---|---|---|---|---|---|---|
| ENV | LILGLVII | 21 | 8 | 09 | 15 | | 3606 |
| ENV | KLWVTVYY | 44 | 8 | 11 | 17 | | 3607 |
| ENV | NLWVTVYY | 44 | 8 | 35 | 56 | | 3608 |
| ENV | VYYGVPVW | 49 | 8 | 55 | 86 | | 3609 |
| ENV | DTEVHNVW | 75 | 8 | 19 | 30 | | 3610 |
| ENV | NVTENFNM | 101 | 8 | 34 | 53 | | 3611 |
| ENV | VTENFNMW | 102 | 8 | 34 | 53 | | 3612 |
| ENV | SLKPCVKL | 128 | 8 | 55 | 86 | | 3613 |
| ENV | LTPLCVTL | 135 | 8 | 54 | 84 | | 3614 |
| ENV | HYCAPAGF | 262 | 8 | 27 | 42 | | 3615 |
| ENV | HYCTPAGF | 262 | 8 | 11 | 17 | | 3616 |
| ENV | CTPAGFAI | 264 | 8 | 10 | 16 | | 3617 |
| ENV | TVQCTHGI | 290 | 8 | 51 | 80 | | 3618 |
| ENV | PVVSTQLL | 300 | 8 | 60 | 94 | | 3619 |
| ENV | VVSTQLLL | 301 | 8 | 60 | 94 | | 3620 |
| ENV | QLLLNGSL | 305 | 8 | 57 | 89 | | 3621 |
| ENV | NTRKSIRI | 351 | 8 | 10 | 16 | | 3622 |
| ENV | RIGPCQTF | 357 | 8 | 11 | 17 | | 3623 |
| ENV | GIGPGQTF | 360 | 8 | 01 | 33 | | 3624 |
| ENV | SIGSGQAF | 360 | 8 | 01 | 33 | | 3625 |
| ENV | FYATGDII | 367 | 8 | 12 | 19 | | 3626 |
| ENV | KLREIRQI | 405 | 8 | 01 | 25 | | 3627 |
| ENV | SFNCGGEF | 437 | 8 | 36 | 56 | | 3628 |
| ENV | SFNCRGLF | 437 | 8 | 16 | 25 | | 3629 |
| ENV | FYCNTSGL | 445 | 8 | 21 | 33 | | 3630 |
| ENV | IITEGNITL | 478 | 8 | 01 | 50 | | 3631 |
| ENV | NITLPCRI | 482 | 8 | 11 | 17 | | 3632 |
| ENV | TITLPCRI | 482 | 8 | 14 | 22 | | 3633 |
| ENV | RIKQIINM | 488 | 8 | 30 | 47 | | 3634 |
| ENV | RIKQIVNM | 488 | 8 | 12 | 19 | | 3635 |
| ENV | QIRCSSNI | 512 | 8 | 11 | 17 | | 3636 |
| ENV | STNGTETF | 537 | 8 | 01 | 17 | | 3637 |
| ENV | KVVKIEPL | 565 | 8 | 25 | 39 | | 3638 |
| ENV | AVGIGAVF | 595 | 8 | 11 | 17 | | 3639 |
| ENV | STMGAASI | 614 | 8 | 39 | 61 | | 3640 |
| ENV | LTVQARQL | 623 | 8 | 38 | 59 | | 3641 |
| ENV | TVQARQLL | 624 | 8 | 36 | 56 | | 3642 |
| ENV | IVQQQNNL | 634 | 8 | 26 | 41 | | 3643 |
| ENV | IVQQQSNL | 634 | 8 | 32 | 50 | | 3644 |
| ENV | AIEAQQHL | 644 | 8 | 49 | 77 | | 3645 |
| ENV | HLLKLTVW | 650 | 8 | 13 | 20 | | 3646 |
| ENV | HLLQLTVW | 650 | 8 | 34 | 53 | | 3647 |
| ENV | HMLQLTVW | 650 | 8 | 10 | 16 | | 3648 |
| ENV | TVWGIKQL | 655 | 8 | 59 | 92 | | 3649 |
| ENV | RVLAVERY | 665 | 8 | 33 | 52 | | 3650 |
| ENV | VLAVERYL | 666 | 8 | 34 | 53 | | 3651 |
| ENV | RYLKDQQL | 671 | 8 | 30 | 47 | | 3652 |
| ENV | RYLRDQQL | 671 | 8 | 18 | 28 | | 3653 |
| ENV | YLKDQQLL | 672 | 8 | 31 | 48 | 0.0001 | 3654 |
| ENV | YLRDQQLL | 672 | 8 | 18 | 28 | | 3655 |
| ENV | IWGCSGKL | 681 | 8 | 48 | 75 | | 3656 |
| ENV | NVPWNSSW | 693 | 8 | 13 | 20 | | 3657 |
| ENV | EIWDNMTW | 716 | 8 | 13 | 20 | | 3658 |
| ENV | IWDNMTWM | 717 | 8 | 11 | 17 | | 3659 |
| ENV | IWNNMTWM | 717 | 8 | 17 | 27 | | 3660 |
| ENV | WMEWEREI | 723 | 8 | 12 | 19 | | 3661 |
| ENV | DLLALDKW | 754 | 8 | 21 | 33 | | 3662 |
| ENV | ELLELDKW | 754 | 8 | 20 | 31 | | 3663 |
| ENV | ALDKWASL | 757 | 8 | 11 | 17 | | 3664 |
| ENV | ELDKWASL | 757 | 8 | 18 | 28 | | 3665 |
| ENV | KWASLWNW | 760 | 8 | 26 | 41 | | 3666 |
| ENV | SLWNWFDI | 763 | 8 | 17 | 27 | | 3667 |
| ENV | WFDITNWL | 767 | 8 | 10 | 16 | | 3668 |
| ENV | DITNWLWY | 769 | 8 | 10 | 16 | | 3669 |
| ENV | ITKWLWYI | 770 | 8 | 16 | 25 | | 3670 |
| ENV | ITNWLWYI | 770 | 8 | 19 | 30 | | 3671 |
| ENV | KWLWYIKI | 772 | 8 | 19 | 30 | | 3672 |
| ENV | NWLWYIKI | 772 | 8 | 25 | 39 | | 3673 |
| ENV | WLWYIKIF | 773 | 8 | 50 | 78 | | 3674 |
| ENV | LWYIKIFI | 774 | 8 | 49 | 77 | | 3675 |
| ENV | WYIKIFIM | 775 | 8 | 43 | 67 | | 3676 |
| ENV | VIKIFIMI | 776 | 8 | 43 | 67 | | 3677 |
| ENV | FIMIVGGL | 780 | 8 | 44 | 69 | | 3678 |
| ENV | IMIYGGLI | 781 | 8 | 35 | 56 | | 3679 |
| ENV | IYGGLIGL | 783 | 8 | 42 | 66 | | 3680 |
| ENV | IVGGLVGL | 783 | 8 | 10 | 16 | | 3681 |
| ENV | GLIGLRII | 786 | 8 | 51 | 23 | | 3682 |
| ENV | LIGLRIIF | 787 | 8 | 16 | 25 | | 3683 |
| ENV | LIGLRIVF | 787 | 8 | 29 | 45 | | 3684 |
| ENV | IIFAVLSI | 792 | 8 | 15 | 23 | | 3685 |
| ENV | IYFAYLSI | 792 | 8 | 20 | 31 | | 3686 |
| ENV | PLSFQTLL | 809 | 8 | 10 | 16 | | 3687 |
| ENV | SIRLVNGF | 842 | 8 | 13 | 20 | | 3688 |
| ENV | SIRLVSGF | 842 | 8 | 13 | 20 | | 3689 |
| ENV | LVNGFLAL | 845 | 8 | 14 | 22 | | 3690 |
| ENV | LYSGFLAL | 845 | 8 | 19 | 30 | | 3691 |
| ENV | AWDDLRSL | 853 | 8 | 20 | 31 | | 3692 |
| ENV | DLRNLCLF | 856 | 8 | 17 | 27 | | 3693 |
| ENV | DLRSLCLF | 856 | 8 | 38 | 59 | | 3694 |
| ENV | CLFSYHRL | 861 | 8 | 42 | 66 | | 3695 |
| ENV | SYIIRLRDF | 864 | 8 | 18 | 28 | | 3696 |
| ENV | SYHRLRDL | 864 | 8 | 23 | 36 | | 3697 |
| ENV | RLRDLLLI | 867 | 8 | 13 | 20 | | 3698 |
| ENV | ELLGHSSL | 881 | 8 | 09 | 15 | | 3699 |
| ENV | ELLGRRGW | 881 | 8 | 23 | 37 | | 3700 |
| ENV | GWEALKYL | 896 | 8 | 12 | 19 | | 3701 |
| ENV | GWEGLKYL | 896 | 8 | 12 | 19 | | 3702 |
| ENV | YWWNLLQY | 902 | 8 | 15 | 23 | | 3703 |
| ENV | WWNLLQYW | 903 | 8 | 15 | 23 | | 3704 |
| ENV | SLLNATAI | 920 | 8 | 14 | 22 | | 3705 |
| ENV | ILIIIPRRI | 947 | 8 | 13 | 20 | | 3706 |
| ENV | PTRIRQGL | 951 | 8 | 12 | 19 | | 3707 |
| ENV | TVYYGVPVW | 48 | 9 | 55 | 86 | | 3708 |
| ENV | VWKEATTTL | 55 | 9 | 22 | 34 | 0.0300 | 3709 |
| ENV | PTDPNPQEI | 89 | 9 | 25 | 39 | | 3710 |
| ENV | NVTENFNMW | 101 | 9 | 34 | 53 | | 3711 |
| ENV | NFNMWKNDM | 105 | 9 | 12 | 19 | | 3712 |
| ENV | NFNMWKNNM | 105 | 9 | 18 | 28 | | 3713 |
| ENV | MVEQMIIEDI | 113 | 9 | 23 | 36 | | 3714 |
| ENV | QMIIEDIISL | 116 | 9 | 29 | 45 | | 3715 |
| ENV | IISLWDQSL | 121 | 9 | 38 | 59 | | 3716 |
| ENV | VISLWDQSL | 121 | 9 | 10 | 16 | | 3717 |
| ENV | KLTPLCVTL | 134 | 9 | 52 | 81 | | 3718 |
| ENV | EIKNCSFNI | 181 | 9 | 13 | 20 | | 3719 |
| ENV | LINCNTSAI | 237 | 9 | 15 | 23 | | 3720 |
| ENV | KVSFEPIPI | 252 | 9 | 30 | 47 | | 3721 |
| ENV | SFEPIPIIIY | 254 | 9 | 31 | 48 | | 3722 |
| ENV | ILKCNDKKF | 271 | 9 | 12 | 19 | | 3723 |
| ENV | STVQCTIIGI | 289 | 9 | 51 | 80 | | 3724 |
| ENV | PVVSTQLLL | 300 | 9 | 60 | 94 | | 3725 |
| ENV | SLAEEEVVI | 311 | 9 | 13 | 20 | | 3726 |
| ENV | RIGPGQTFY | 357 | 9 | 11 | 17 | | 3727 |
| ENV | GIGPGQTFY | 360 | 9 | 01 | 33 | | 3728 |
| ENV | SIGSGQAFY | 360 | 9 | 01 | 33 | | 3729 |
| ENV | ATGDIIGDI | 369 | 9 | 12 | 19 | | 3730 |
| ENV | DIRQAIICNI | 380 | 9 | 15 | 23 | | 3731 |
| ENV | DLEITTIISF | 428 | 9 | 21 | 33 | | 3732 |
| ENV | SFNCGGEFF | 437 | 9 | 35 | 55 | | 3733 |
| ENV | SFNCRGEFF | 437 | 9 | 16 | 25 | | 3734 |
| ENV | FFYCNTSGL | 444 | 9 | 21 | 33 | | 3735 |
| ENV | FYCNTSGLF | 445 | 9 | 21 | 33 | | 3736 |
| ENV | TLPCRIKQI | 484 | 9 | 26 | 41 | | 3737 |
| ENV | RIKQIINMW | 488 | 9 | 30 | 47 | | 3738 |
| ENV | RIKQIVNMW | 488 | 9 | 12 | 19 | | 3739 |
| ENV | MWQEVGKAM | 495 | 9 | 15 | 23 | | 3740 |
| ENV | MWQRVGQAM | 495 | 9 | 10 | 16 | | 3741 |
| ENV | IFRPGGGDM | 545 | 9 | 17 | 27 | | 3742 |
| ENV | TFRPGGGDM | 545 | 9 | 25 | 39 | | 3743 |
| ENV | NWRSELYKY | 556 | 9 | 54 | 84 | | 3744 |
| ENV | LYKYKVVEI | 561 | 9 | 13 | 20 | | 3745 |
| ENV | LYKYKVVKI | 561 | 9 | 29 | 45 | 0.0200 | 3746 |
| ENV | AVGIGAVFL | 595 | 9 | 11 | 17 | | 3747 |
| ENV | GIGAVFLGF | 598 | 9 | 11 | 18 | | 3748 |
| ENV | MLGAMFLGF | 599 | 9 | 04 | 36 | | 3749 |
| ENV | TIGAMFLGF | S99 | 9 | 03 | 27 | | 3750 |
| ENV | FLGAAGSTM | 608 | 9 | 55 | 86 | | 3751 |
| ENV | TMGAASITL | 615 | 9 | 39 | 61 | | 3752 |
| ENV | TLTVQARQL | 622 | 9 | 37 | 58 | | 3753 |
| ENV | LTVQARQLL | 623 | 9 | 36 | 56 | | 3754 |
| ENV | GIVQQQNNL | 633 | 9 | 26 | 41 | | 3755 |
| ENV | GIVQQQSNL | 633 | 9 | 32 | 50 | | 3756 |
| ENV | IVQQQNNLL | 634 | 9 | 26 | 41 | | 3757 |
| ENV | IVQQQSNLL | 634 | 9 | 32 | 50 | | 3758 |
| ENV | AIEAQQNLL | 644 | 9 | 48 | 75 | | 3759 |
| ENV | LLKLTVWGI | 651 | 9 | 13 | 20 | | 3760 |
| ENV | LLQLTVWGI | 651 | 9 | 34 | 53 | | 3761 |
| ENV | MLQLTVWGI | 651 | 9 | 10 | 16 | | 3762 |
| ENV | LTVWGIKQL | 654 | 9 | 59 | 92 | | 3763 |
| ENV | RYLAVERYL | 665 | 9 | 33 | 52 | | 3764 |
| ENV | RYLKDQQLL | 671 | 9 | 29 | 45 | 0.7600 | 3765 |
| ENV | RYLRDQQLL | 671 | 9 | 17 | 27 | 0.2300 | 3766 |
| ENV | GIWGCSGKL | 680 | 9 | 48 | 75 | | 3767 |
| ENV | IWGCSGKLI | 681 | 9 | 48 | 75 | 0.0270 | 3768 |
| ENV | LICTTAVPW | 688 | 9 | 19 | 30 | | 3769 |
| ENV | LICTTNVPW | 688 | 9 | 17 | 27 | | 3770 |
| ENV | LICTTTVPW | 688 | 9 | 12 | 19 | | 3771 |
| ENV | IWMEWEREI | 722 | 9 | 12 | 19 | | 3772 |
| ENV | EWEREIDNY | 725 | 9 | 11 | 17 | | 3773 |
| ENV | ALDKWASLW | 757 | 9 | 11 | 17 | | 3774 |
| ENV | ELDKWASLW | 757 | 9 | 18 | 28 | | 3775 |
| ENV | KWASLWNWF | 760 | 9 | 26 | 41 | | 3776 |
| ENV | WFDITNWLW | 767 | 9 | 10 | 16 | | 3777 |
| ENV | DITNWLWYI | 769 | 9 | 10 | 16 | | 3778 |
| ENV | KWLWYIKIP | 772 | 9 | 16 | 25 | | 3779 |
| ENV | NWLWYIKIF | 772 | 9 | 25 | 39 | | 3780 |
| ENV | WLWYIKIFI | 773 | 9 | 49 | 77 | | 3781 |
| ENV | LWYIKIFIM | 774 | 9 | 43 | 67 | | 3782 |
| ENV | WYIKIFIMI | 775 | 9 | 43 | 67 | | 3783 |
| ENV | IFIMIVGGL | 779 | 9 | 41 | 64 | | 3784 |
| ENV | FIMIVGGLI | 780 | 9 | 35 | 55 | | 3785 |
| ENV | MIVGGLIGL | 782 | 9 | 36 | 56 | | 3786 |
| ENV | GLIGLRIIF | 786 | 9 | 15 | 23 | | 3787 |
| ENV | GLIGLRIVF | 786 | 9 | 29 | 45 | | 3788 |
| ENV | GLRIIFAVL | 789 | 9 | 17 | 27 | | 3789 |
| ENV | GLRIVFAVL | 789 | 9 | 28 | 44 | | 3790 |
| ENV | RIIFAYLSI | 791 | 9 | 14 | 22 | | 3791 |
| ENV | RIVFAVLSI | 791 | 9 | 19 | 30 | | 3792 |
| ENV | IVNRVRQGY | 799 | 9 | 38 | 59 | | 3793 |
| ENV | RVRQGYSPL | 802 | 9 | 55 | 86 | | 3794 |
| ENV | SIRLVNGFL | 842 | 9 | 11 | 17 | | 3795 |
| ENV | SIRLVSGFL | 842 | 9 | 13 | 20 | | 3796 |
| ENV | RLVNGFLAL | 844 | 9 | 12 | 19 | | 3797 |
| ENV | RLVSGFLAL | 844 | 9 | 19 | 30 | | 3798 |
| ENV | FLALAWDDL | 849 | 9 | 25 | 39 | | 3799 |
| ENV | SYHRLRDFI | 864 | 9 | 13 | 20 | | 3800 |
| ENV | SYHRLRDLL | 864 | 9 | 14 | 22 | | 3801 |
| ENV | LIAARTVEL | 873 | 9 | 12 | 19 | | 3802 |
| ENV | SLKGLRLGW | 889 | 9 | 11 | 39 | | 3803 |
| ENV | SLRGLQRGW | 889 | 9 | 05 | 18 | | 3804 |
| ENV | GLRLGWEGL | 892 | 9 | 10 | 32 | | 3805 |
| ENV | RLGWEGLKY | 894 | 9 | 09 | 29 | | 3806 |
| ENV | KYWWNLLQY | 901 | 9 | 14 | 22 | | 3807 |
| ENV | YWWNLLQYW | 902 | 9 | 15 | 23 | | 3808 |
| ENV | LLQYWSQEL | 906 | 9 | 16 | 25 | | 3809 |
| ENV | ELKNSAINL | 913 | 9 | 10 | 16 | | 3810 |
| ENV | ELKNSAISL | 913 | 9 | 10 | 16 | | 3811 |
| ENV | ELKNSAVSL | 913 | 9 | 12 | 19 | | 3812 |
| ENV | AVAEGTDRI | 928 | 9 | 16 | 25 | | 3813 |
| ENV | AILHIPRRI | 946 | 9 | 12 | 19 | | 3814 |
| ENV | VTVYYGVPVW | 47 | 10 | 55 | 86 | | 3815 |
| ENV | PVWKEATTTL | 54 | 10 | 22 | 34 | | 3816 |
| ENV | VWKEATTTLF | 55 | 10 | 22 | 34 | 0.2700 | 3817 |
| ENV | LFCASDAKAY | 65 | 10 | 42 | 66 | | 3818 |
| ENV | AYDTEVHNVW | 73 | 10 | 18 | 28 | | 3819 |
| ENV | MWKNNMVEQ | 108 | 10 | 35 | 55 | | 3820 |
| ENV | NMVEQMIIEDI | 112 | 10 | 20 | 31 | 0.0004 | 3821 |
| ENV | MVEQMIIEDII | 113 | 10 | 23 | 36 | | 3822 |
| ENV | QMIIEDIISLW | 116 | 10 | 29 | 45 | | 3823 |
| ENV | DIISLWDQSL | 120 | 10 | 38 | 59 | | 3824 |
| ENV | DVISLWDQSL | 120 | 10 | 10 | 16 | | 3825 |
| ENV | RLINCNISAI | 236 | 10 | 15 | 24 | | 3826 |
| ENV | ITQACPKVSF | 245 | 10 | 29 | 45 | | 3827 |
| ENV | PIHYCAPAGF | 260 | 10 | 27 | 42 | | 3828 |
| ENV | PIIIYCTPAGF | 260 | 10 | 10 | 16 | | 3829 |
| ENV | IIYCAPAGFAI | 262 | 10 | 27 | 42 | | 3830 |
| ENV | IIYCTPAGFAI | 262 | 10 | 10 | 16 | | 3831 |
| ENV | AILKCNDKKF | 270 | 10 | 12 | 19 | | 3832 |
| ENV | GIKPVVSTQL | 297 | 10 | 33 | 52 | | 3833 |
| ENV | GIRPVVSIQL | 297 | 10 | 26 | 41 | | 3834 |
| ENV | STQLLLNGSL | 303 | 10 | 57 | 89 | | 3835 |
| ENV | NTSPRSRVAY | 376 | 10 | 01 | 33 | | 3836 |
| ENV | SFNCGGEFFY | 437 | 10 | 35 | 55 | | 3837 |
| ENV | SFNCRGEFFY | 437 | 10 | 16 | 25 | | 3838 |
| ENV | EFFYCNTSGL | 443 | 10 | 21 | 33 | | 3839 |
| ENV | FFYCNTSGLF | 444 | 10 | 21 | 33 | | 3840 |
| ENV | ITLPCRIKQI | 483 | 10 | 25 | 39 | | 3841 |
| ENV | TLPCRIKQII | 484 | 10 | 15 | 23 | | 3842 |
| ENV | NMWQEVGKA | 494 | 10 | 15 | 23 | 0.0001 | 3843 |
| ENV | MWQEVGKAM | 495 | 10 | 15 | 23 | | 3844 |
| ENV | MWQRVGQAM | 495 | 10 | 10 | 16 | | 3845 |
| ENV | NTETNKTETF | 537 | 10 | 01 | 17 | | 3846 |
| ENV | NTTGNTTETF | 537 | 10 | 01 | 17 | | 3847 |
| ENV | EIFRPGGGDM | 544 | 10 | 17 | 27 | | 3848 |
| ENV | ETFRPGGGDM | 544 | 10 | 21 | 33 | | 3849 |
| ENV | DMRDNWRSEL | 552 | 10 | 37 | 38 | | 3850 |
| ENV | ELYKYKYVEI | 560 | 10 | 13 | 21 | | 3851 |
| ENV | ELYKYKVVKI | 560 | 10 | 29 | 46 | | 3852 |
| ENV | KYKVVKIEPL | 563 | 10 | 25 | 39 | | 3853 |
| ENV | GIGAVFLGFL | 598 | 10 | 11 | 18 | | 3854 |
| ENV | MLGAMFLGFL | 599 | 10 | 04 | 36 | | 3855 |
| ENV | TIGAMFLGFL | 599 | 10 | 03 | 27 | | 3856 |
| ENV | GFLGAAGSTM | 606 | 10 | 55 | 86 | | 3857 |
| ENV | STMGAASITL | 614 | 10 | 39 | 61 | | 3858 |
| ENV | ITLTVQARQL | 621 | 10 | 27 | 42 | | 3859 |
| ENV | TLTVQARQLL | 622 | 10 | 35 | 55 | | 3860 |
| ENV | GIVQQQNNLL | 633 | 10 | 26 | 41 | | 3861 |
| ENV | GIVQQQSNLL | 633 | 10 | 32 | 50 | | 3862 |
| ENV | HLLKLTVWGI | 650 | 10 | 13 | 20 | | 3863 |
| ENV | HLLQLTVWGI | 650 | 10 | 34 | 53 | | 3864 |
| ENV | KLTVWGIKQL | 653 | 10 | 13 | 20 | | 3865 |
| ENV | QLTVWGIKQL | 653 | 10 | 44 | 69 | | 3866 |
| ENV | GIKQLQARVL | 658 | 10 | 40 | 63 | | 3867 |
| ENV | YLKDQQLLGI | 672 | 10 | 27 | 42 | | 3868 |
| ENV | YLRDQQLLGI | 672 | 10 | 18 | 28 | | 3869 |
| ENV | GIWGCSGKLI | 680 | 10 | 48 | 75 | | 3870 |
| ENV | KLICTTAVPW | 687 | 10 | 19 | 30 | | 3871 |
| ENV | KLICTTNVPW | 687 | 10 | 17 | 27 | | 3872 |
| ENV | KLICTTTVPW | 687 | 10 | 12 | 19 | | 3873 |
| ENV | TTNVPWNSS | 691 | 10 | 11 | 17 | | 3874 |
| ENV | IWNNMTWME | 717 | 10 | 10 | 16 | | 3875 |
| ENV | MTWMEWERE | 721 | 10 | 12 | 19 | | 3876 |
| ENV | LLALDKWASL | 755 | 10 | 11 | 17 | | 3877 |
| ENV | LLELDKWASL | 755 | 10 | 18 | 28 | | 3878 |
| ENV | WFDITNWLW | 767 | 10 | 10 | 16 | | 3879 |
| ENV | ITKWLWYIKI | 770 | 10 | 15 | 23 | | 3880 |
| ENV | ITNWLWYIKI | 770 | 10 | 14 | 22 | | 3881 |
| ENV | KWLWYIKIFI | 772 | 10 | 16 | 25 | | 3882 |
| ENV | NWLWYIKIFI | 772 | 10 | 25 | 39 | | 3883 |
| ENV | WLWYIKIFIM | 773 | 10 | 43 | 67 | | 3884 |
| ENV | LWYIKIFIMI | 774 | 10 | 43 | 67 | | 3885 |
| ENV | KIFIMIVGGL | 778 | 10 | 38 | 59 | | 3886 |
| ENV | IFIMIVGGLI | 779 | 10 | 33 | 52 | | 3887 |
| ENV | IMIVGGLIGL | 781 | 10 | 34 | 54 | | 3888 |
| ENV | IVGGLIGLRI | 783 | 10 | 42 | 66 | | 3889 |
| ENV | SIVNRVRQGY | 798 | 10 | 36 | 56 | | 3890 |
| ENV | GYSPLSFQTL | 806 | 10 | 29 | 45 | | 3891 |
| ENV | LVSGFLALAW | 845 | 10 | 16 | 25 | | 3892 |
| ENV | GFLALAWDDL | 848 | 10 | 25 | 39 | | 3893 |
| ENV | ALAWDDLRSL | 851 | 10 | 19 | 30 | | 3894 |
| ENV | AWDDLRSLCL | 853 | 10 | 20 | 31 | | 3895 |
| ENV | DLRNLCLFSY | 856 | 10 | 16 | 25 | | 3896 |
| ENV | DLRSLCLFSY | 856 | 10 | 35 | 55 | | 3897 |
| ENV | NLCLFSYHRL | 859 | 10 | 11 | 17 | | 3898 |
| ENV | SLCLFSYHRL | 859 | 10 | 31 | 48 | | 3899 |
| ENV | LFSYHRLRDP | 862 | 10 | 18 | 28 | | 3900 |
| ENV | LFSYHRLRDL | 862 | 10 | 22 | 34 | | 3901 |
| ENV | SYHRLRDFIL | 864 | 10 | 13 | 20 | | 3902 |
| ENV | SYHRLRDLLL | 864 | 10 | 12 | 19 | | 3903 |
| ENV | LIAARTVELL | 873 | 10 | 11 | 17 | | 3904 |
| ENV | IVELLGRRGW | 879 | 10 | 22 | 34 | | 3905 |
| ENV | LLGRRGWEAL | 882 | 10 | 09 | 15 | | 3906 |
| ENV | RLGWEGLKYL | 894 | 10 | 09 | 29 | | 3907 |
| ENV | KYWWNLLQY | 901 | 10 | 14 | 22 | | 3908 |
| ENV | NLLQYWSQEL | 905 | 10 | 16 | 25 | | 3909 |
| ENV | ELKNSAVSLL | 913 | 10 | 10 | 16 | | 3910 |
| ENV | AVSLLNATAI | 918 | 10 | 11 | 17 | | 3911 |
| ENV | AVAEGIDRII | 928 | 10 | 15 | 23 | | 3912 |
| ENV | AVAEGTDRVI | 928 | 10 | 14 | 22 | | 3913 |
| ENV | IIIPRRIRQGL | 949 | 10 | 13 | 21 | | 3914 |
| ENV | NIPRRIRQGL | 949 | 10 | 11 | 17 | | 3915 |
| ENV | RIRQGLERAL | 953 | 10 | 34 | 53 | | 3916 |
| ENV | WVTVYYGVPV | 46 | 11 | 55 | 86 | | 3917 |
| ENV | PVWKEATTTL | 54 | 11 | 22 | 34 | | 3918 |
| ENV | TLFCASDAKA | 64 | 11 | 40 | 63 | | 3919 |
| ENV | CVPTDPNPQEI | 87 | 11 | 25 | 39 | | 3920 |
| ENV | PTDPNPQEVVL | 89 | 11 | 12 | 19 | | 3921 |
| ENV | NMWKNNMVE | 107 | 11 | 30 | 47 | | 3922 |
| ENV | NMVEQMIIEDII | 112 | 11 | 20 | 31 | | 3923 |
| ENV | SLKPCVKLTPL | 128 | 11 | 54 | 84 | | 3924 |
| ENV | CVKLTPLCVT | 132 | 11 | 52 | 81 | | 3925 |
| ENV | VITQACPKVSF | 244 | 11 | 14 | 22 | | 3926 |
| ENV | KYSFEPIPIIIY | 252 | 11 | 28 | 44 | | 3927 |
| ENV | IIYCAPAGFAIL | 262 | 11 | 27 | 42 | | 3928 |
| ENV | NVSTVQCTHGI | 287 | 11 | 51 | 80 | | 3929 |
| ENV | GIKPVVSTQLL | 297 | 11 | 33 | 52 | | 3930 |
| ENV | GIRPVVSTQLL | 297 | 11 | 26 | 41 | | 3931 |
| ENV | PYATGDIIGDI | 367 | 11 | 11 | 17 | | 3932 |
| ENV | GTAGNSSRAA | 375 | 11 | 01 | 33 | | 3933 |
| ENV | TTIISFNCGGE | 432 | 11 | 16 | 25 | | 3934 |
| ENV | TTIISFNCRGE | 432 | 11 | 12 | 19 | | 3935 |
| ENV | VMIISFNCGGE | 432 | 11 | 13 | 20 | | 3936 |
| ENV | EFFYCNTSGLF | 443 | 11 | 21 | 33 | | 3937 |
| ENV | NITLPCRIKQI | 482 | 11 | 11 | 17 | | 3938 |
| ENV | TITLPCRIKQI | 482 | 11 | 13 | 20 | | 3939 |
| ENV | ITLPCRIKQII | 483 | 11 | 15 | 23 | | 3940 |
| ENV | NMWQEVGKA | 494 | 11 | 15 | 23 | | 3941 |
| ENV | EVGKAMYAPPI | 498 | 11 | 18 | 28 | | 3942 |
| ENV | RVGQAMYAPP | 498 | 11 | 10 | 16 | | 3943 |
| ENV | QIRCSSNITGL | 512 | 11 | 11 | 17 | | 3944 |
| ENV | DMRDNWRSEL | 552 | 11 | 37 | 58 | | 3945 |
| ENV | VVEREKRAVGI | 588 | 11 | 11 | 17 | | 3946 |
| ENV | AVGIGAVFLGF | 595 | 11 | 11 | 17 | | 3947 |
| ENV | SITLTVQARQL | 620 | 11 | 27 | 42 | | 3948 |
| ENV | ITLTVQARQLL | 621 | 11 | 27 | 42 | | 3949 |
| ENV | TVQARQLLSGI | 624 | 11 | 36 | 56 | | 3950 |
| ENV | LLRAIEAQQHL | 641 | 11 | 45 | 70 | | 3951 |
| ENV | AIEAQQHLLKL | 644 | 11 | 12 | 19 | | 3952 |
| ENV | AIEAQQHLLQL | 644 | 11 | 35 | 55 | | 3953 |
| ENV | AVERYLKDQQ | 668 | 11 | 23 | 36 | | 3954 |
| ENV | AVERYLRDQQ | 668 | 11 | 11 | 17 | | 3955 |
| ENV | RYLKDQQLLGI | 671 | 11 | 25 | 39 | | 3956 |
| ENV | RYLRDQQLLGI | 671 | 11 | 17 | 27 | | 3957 |
| ENV | YLKDQQLLGI | 672 | 11 | 27 | 42 | | 3958 |
| ENV | YLRDQQLLGI | 672 | 11 | 18 | 28 | | 3959 |
| ENV | LLGIWGCSGKL | 678 | 11 | 46 | 72 | | 3960 |
| ENV | CTTNVPWNSS | 690 | 11 | 11 | 17 | | 3961 |
| ENV | NMTWMEWER | 720 | 11 | 12 | 19 | | 3962 |
| ENV | WMEWEREIDN | 723 | 11 | 10 | 16 | | 3963 |
| ENV | ELLELDKWAS | 754 | 11 | 15 | 23 | | 3964 |
| ENV | LLALDKWASL | 755 | 11 | 11 | 17 | | 3965 |
| ENV | LLELDKWASL | 755 | 11 | 18 | 28 | | 3966 |
| ENV | ALDKWASLW | 757 | 11 | 10 | 16 | | 3967 |
| ENV | ELDKWASLWN | 757 | 11 | 16 | 25 | | 3968 |
| ENV | KWASLWNWF | 760 | 11 | 15 | 23 | | 3969 |
| ENV | WFDITNWLW | 767 | 11 | 15 | 16 | | 3970 |
| ENV | ITKWLWVIKIF | 770 | 11 | 12 | 19 | | 3971 |
| ENV | ITNWLWYIKIF | 770 | 11 | 14 | 22 | | 3972 |
| ENV | KWLWYIKIFIM | 772 | 11 | 15 | 23 | | 3973 |
| ENV | NWLWVIKIFIM | 772 | 11 | 22 | 34 | | 3974 |
| ENV | WLWYIKIFIMI | 773 | 11 | 43 | 67 | | 3975 |
| ENV | KIFIMIVGGLI | 778 | 11 | 31 | 48 | | 3976 |
| ENV | FIMIVGGLIGL | 780 | 11 | 34 | 53 | | 3977 |
| ENV | MIVGGLIGLRI | 782 | 11 | 36 | 56 | | 3978 |
| ENV | IVGGLIGLRII | 783 | 11 | 12 | 19 | | 3979 |
| ENV | LIGLRIIFAVL | 787 | 11 | 15 | 23 | | 3980 |
| ENV | LIGLRIVFAVL | 787 | 11 | 20 | 31 | | 3981 |
| ENV | GLRIIFAVLSI | 789 | 11 | 14 | 22 | | 3982 |
| ENV | GLRIVFAVLSI | 789 | 11 | 19 | 30 | | 3983 |
| ENV | RVRQGYSPLSF | 802 | 11 | 47 | 73 | | 3984 |
| ENV | SIRLVSGFLAL | 842 | 11 | 11 | 17 | | 3985 |
| ENV | RLVSGFLALA | 844 | 11 | 16 | 25 | | 3986 |
| ENV | AWDDLRSLCL | 853 | 11 | 20 | 31 | | 3987 |
| ENV | CLFSYIIRLRDF | 861 | 11 | 18 | 28 | | 3988 |
| ENV | CLFSYIIRLRDL | 861 | 11 | 20 | 31 | | 3989 |
| ENV | LFSYIIRLRDFI | 862 | 11 | 13 | 20 | | 3990 |
| ENV | LFSYIIRLRDLL | 862 | 11 | 13 | 20 | | 3991 |
| ENV | SYIIRLRDLLLI | 864 | 11 | 10 | 16 | | 3992 |
| ENV | RIVELLGRRG | 878 | 11 | 22 | 34 | | 3993 |
| ENV | ELLGRRGWEA | 881 | 11 | 09 | 15 | | 3994 |
| ENV | GLRLGWEGLK | 892 | 11 | 09 | 29 | | 3995 |
| ENV | RLGWEGLKYL | 894 | 11 | 07 | 23 | | 3996 |
| ENV | YWGQELKNSA | 909 | 11 | 12 | 19 | | 3997 |
| ENV | AIAVAEGTDRI | 926 | 11 | 16 | 25 | | 3998 |
| ENV | RIRQGLERALL | 953 | 11 | 33 | 52 | | 3999 |
| GAG | SVLSGGEL | 6 | 8 | 11 | 17 | | 4000 |
| GAG | SVLSGGKL | 6 | 8 | 28 | 44 | | 4001 |
| GAG | KLDAWEKI | 12 | 8 | I11 | 28 | | 4002 |
| GAG | KLDKWEKI | 12 | 8 | 10 | 16 | | 4003 |
| GAG | IVWASREL | 35 | 8 | 21 | 33 | | 4004 |
| GAG | LVWASREL | 35 | 8 | 36 | S6 | | 4005 |
| GAG | RFALNPGL | 45 | 8 | 20 | 31 | | 4006 |
| GAG | RFAVNPGL | 45 | 8 | 16 | 25 | | 4007 |
| GAG | GTEELRSL | 73 | 8 | 12 | 19 | | 4008 |
| GAG | LFNTVATL | 80 | 8 | 16 | 25 | | 4009 |
| GAG | LYNTVATL | 80 | 8 | 22 | 34 | | 4010 |
| GAG | LYCVIIQKI | 87 | 8 | 13 | 20 | | 4011 |
| GAG | LYCVIIQRI | 87 | 8 | 18 | 28 | | 4012 |
| GAG | KVSQNYPI | 148 | 8 | 15 | 27 | | 4013 |
| GAG | QVSQNYPI | 148 | 8 | 27 | 48 | | 4014 |
| GAG | NYPIVQNL | 152 | 8 | 31 | 48 | | 4015 |
| GAG | KVIEEKAF | 178 | 8 | 24 | 38 | | 4016 |
| GAG | KVVIEEKAP | 178 | 8 | 28 | 44 | | 4017 |
| GAG | VIPMFSAL | 189 | 8 | 46 | 72 | | 4018 |
| GAG | VIPMFTAL | 189 | 8 | 14 | 22 | | 4019 |
| GAG | ATPQDLNM | 200 | 8 | 12 | 19 | | 4020 |
| GAG | DLNMMLNI | 204 | 8 | 12 | 19 | | 4021 |
| GAG | TLQEQIAW | 263 | 8 | 12 | 19 | | 4022 |
| GAG | TLQEQIGW | 263 | 8 | 27 | 42 | | 4023 |
| GAG | WMTNNPPI | 270 | 8 | 20 | 31 | | 4024 |
| GAG | WMISNPPI | 270 | 8 | 16 | 25 | | 4025 |
| GAG | PIPVGDIY | 279 | 8 | 11 | 17 | | 4026 |
| GAG | PIPVGEIY | 279 | 8 | 35 | 55 | | 4027 |
| GAG | DIYKRWII | 284 | 8 | 17 | 27 | | 4028 |
| GAG | EIYKRWII | 284 | 8 | 39 | 61 | | 4029 |
| GAG | IYKRWIIL | 285 | 8 | 54 | 84 | | 4030 |
| GAG | IILGLNKI | 290 | 8 | 57 | 89 | | 4031 |
| GAG | GLNKIVRM | 293 | 8 | 60 | 94 | | 4032 |
| GAG | RMYSPTSI | 299 | 8 | 14 | 22 | | 4033 |
| GAG | RMYSPVSI | 299 | 8 | 40 | 63 | | 4034 |
| GAG | MYSPTSIL | 300 | 8 | 14 | 22 | | 4035 |
| GAG | MYSPVSIL | 300 | 8 | 42 | 66 | | 4036 |
| GAG | ATQDVKNW | 333 | 8 | 15 | 23 | | 4037 |
| GAG | ATQEVKNW | 333 | 8 | 18 | 28 | | 4038 |
| GAG | NWMTDTLL | 339 | 8 | 16 | 25 | | 4039 |
| GAG | NWMTETLL | 339 | 8 | 36 | 56 | | 4040 |
| GAG | ALGPAATL | 360 | 8 | 16 | 25 | | 4041 |
| GAG | ALGPGATL | 360 | 8 | 18 | 28 | | 4042 |
| GAG | IMMQKSNF | 408 | 8 | 11 | 17 | | 4043 |
| GAG | IMMQRGNF | 408 | 8 | 27 | 42 | | 4044 |
| GAG | CTERQANP | 459 | 8 | 55 | 87 | | 4045 |
| GAG | ETIDKDLY | 537 | 8 | 01 | 25 | | 4046 |
| GAG | ELYPLASL | 543 | 8 | 14 | 22 | | 4047 |
| GAG | ELYPLTSL | 543 | 8 | 11 | 17 | | 4048 |
| GAG | PLASLKSL | 548 | 8 | 15 | 23 | | 4049 |
| GAG | PLTSLKSL | 548 | 8 | 12 | 19 | | 4050 |
| GAG | PLISLRSL | 548 | 8 | 12 | 19 | | 4051 |
| GAG | LTSLKSLF | S49 | 8 | 13 | 20 | | 4052 |
| GAG | LTSLRSLF | 549 | 8 | 12 | 19 | | 4053 |
| GAG | SLFGNDPL | 554 | 8 | 12 | 19 | | 4054 |
| GAG | SLFGSDPL | 554 | 8 | 11 | 17 | | 4055 |
| GAG | KYKLKIIIVW | 29 | 9 | 10 | 16 | | 4056 |
| GAG | KYRLKIILVW | 29 | 9 | 16 | 25 | | 4057 |
| GAG | IIIVWASREL | 34 | 9 | 21 | 33 | | 4058 |
| GAG | IILVWASREL | 34 | 9 | 36 | 56 | | 4059 |
| GAG | RFALNPGLL | 45 | 9 | 20 | 31 | | 4060 |
| GAG | RFAVNPGLL | 45 | 9 | 16 | 25 | 0.0100 | 4061 |
| GAG | ETSEGCRQI | 54 | 9 | 16 | 25 | | 4062 |
| GAG | ILGQLQPSL | 62 | 9 | 11 | 17 | | 4063 |
| GAG | SLQTGSEEL | 69 | 9 | 14 | 22 | | 4064 |
| GAG | SLFNTVATL | 79 | 9 | 16 | 25 | | 4065 |
| GAG | SLYNTVATL | 79 | 9 | 22 | 34 | | 4066 |
| GAG | LFNTVATLY | 80 | 9 | 15 | 23 | | 4067 |
| GAG | LYNTYATLY | 80 | 9 | 22 | 34 | | 4068 |
| GAG | TLYCVIIQKI | 86 | 9 | 12 | 19 | | 4069 |
| GAG | TLYCVIIQRI | 86 | 9 | 15 | 23 | | 4070 |
| GAG | DVKIYIKEAL | 95 | 9 | 11 | 17 | | 4071 |
| GAG | EVKDTKEAL | 95 | 9 | 20 | 31 | | 4072 |
| GAG | DTKEALDKI | 98 | 9 | 32 | 50 | | 4073 |
| GAG | DIKEALEKI | 98 | 9 | 10 | 16 | | 4074 |
| GAG | IVQNAQGQM | 155 | 9 | 21 | 33 | | 4075 |
| GAG | IVQNLQGQM | 155 | 9 | 29 | 45 | | 4076 |
| GAG | TLNAWVKVI | 172 | 9 | 30 | 47 | | 4077 |
| GAG | AFSPEVIPM | 184 | 9 | 50 | 78 | | 4078 |
| GAG | EVIPMFSAL | 188 | 9 | 46 | 72 | | 4079 |
| GAG | EVIPMFTAL | 188 | 9 | 14 | 22 | | 4080 |
| GAG | ATPQDLNMM | 200 | 9 | 12 | 19 | | 4081 |
| GAG | ATPQDLNTM | 200 | 9 | 42 | 66 | | 4082 |
| GAG | IVGGIIQAAM | 211 | 9 | 12 | 19 | | 4083 |
| GAG | TVGGIIQAAM | 211 | 9 | 47 | 73 | | 4084 |
| GAG | AMQMLKDTI | 218 | 9 | 33 | 52 | | 4085 |
| GAG | AMQMLKETI | 218 | 9 | 26 | 41 | | 4086 |
| GAG | TINEEAAEW | 225 | 9 | 53 | 83 | | 4087 |
| GAG | DIAGTTSTL | 256 | 9 | 48 | 75 | | 4088 |
| GAG | TTSTLQEQI | 260 | 9 | 45 | 71 | | 4089 |
| GAG | STLQEQIAW | 262 | 9 | 12 | 19 | | 4090 |
| GAG | STLQEQIGW | 262 | 9 | 27 | 42 | | 4091 |
| GAG | TLQEQIAWM | 263 | 9 | 12 | 19 | | 4092 |
| GAG | TLQEQIGWM | 263 | 9 | 27 | 42 | | 4093 |
| GAG | GWMTNNPPI | 269 | 9 | 18 | 28 | 0.0140 | 4094 |
| GAG | GWMTSNPPI | 269 | 9 | 10 | 16 | | 4095 |
| GAG | PVGDIYKRW | 281 | 9 | 18 | 28 | | 4096 |
| GAG | PVGEIYKRW | 281 | 9 | 40 | 63 | | 4097 |
| GAG | DIYKRWIIL | 284 | 9 | 17 | 27 | | 4098 |
| GAG | EIYKRWIIL | 284 | 9 | 37 | 58 | | 4099 |
| GAG | WIILGLNKI | 289 | 9 | 57 | 89 | | 4100 |
| GAG | GLNKIVRMY | 293 | 9 | 60 | 94 | | 4101 |
| GAG | RMYSPTSIL | 299 | 9 | 14 | 22 | | 4102 |
| GAG | RMYSPVSIL | 299 | 9 | 40 | 63 | | 4103 |
| GAG | PFRDYVDRF | 316 | 9 | 63 | 98 | | 4104 |
| GAG | YVDRFFKTL | 320 | 9 | 27 | 42 | | 4105 |
| GAG | YVDRFYKTL | 320 | 9 | 28 | 44 | | 4106 |
| GAG | ATQDVKNWM | 333 | 9 | 15 | 23 | | 4107 |
| GAG | AIQEVKNWM | 333 | 9 | 18 | 28 | | 4108 |
| GAG | NIMMQRGNF | 407 | 9 | 10 | 17 | | 4109 |
| GAG | NIMMQRGNI | 407 | 9 | 13 | 22 | | 4110 |
| GAG | CTERQANFL | 459 | 9 | 55 | 87 | | 4111 |
| GAG | PTAPPAESF | 495 | 9 | 20 | 31 | | 4112 |
| GAG | PTAPPEESF | 495 | 9 | 15 | 23 | | 4113 |
| GAG | PTAPPAESF | 507 | 9 | 02 | 67 | | 4114 |
| GAG | PTAPPPESF | 507 | 9 | 01 | 33 | | 4115 |
| GAG | PIDKELYPL | 534 | 9 | 12 | 19 | | 4116 |
| GAG | PIDKELYPL | 538 | 9 | 01 | 25 | | 4117 |
| GAG | TIDKDLYPL | 538 | 9 | 01 | 25 | | 4118 |
| GAG | PLASLKSLF | 548 | 9 | 15 | 23 | | 4119 |
| GAG | PLTSLKSLF | 548 | 9 | 12 | 19 | | 4120 |
| GAG | PLTSLRSLF | 548 | 9 | 12 | 19 | | 4121 |
| GAG | VLSGGKLDAW | 7 | 10 | 15 | 23 | | 4122 |
| GAG | KLDAWEKIRL | 12 | 10 | 16 | 25 | | 4123 |
| GAG | KLDKWEKIRL | 12 | 10 | 10 | 16 | | 4124 |
| GAG | RLRPGGKKKY | 20 | 10 | 34 | 53 | | 4125 |
| GAG | VWASRELERF | 36 | 10 | 45 | 70 | | 4126 |
| GAG | ETSEGCRQIL | 54 | 10 | 14 | 22 | | 4127 |
| GAG | QILGQLQPSL | 61 | 10 | 11 | 17 | | 4128 |
| GAG | QTGSEELRSL | 71 | 10 | 12 | 19 | | 4129 |
| GAG | SLPNTVATLY | 79 | 10 | 15 | 23 | | 4130 |
| GAG | SLYNTVATLY | 79 | 10 | 22 | 34 | | 4131 |
| GAG | ATLYCVIIQKI | 85 | 10 | 12 | 19 | | 4132 |
| GAG | ATLYCVIIQRI | 85 | 10 | 15 | 23 | | 4133 |
| GAG | PIVQNAQGQM | 154 | 10 | 21 | 33 | | 4134 |
| GAG | PIVQNLQGQM | 154 | 10 | 29 | 45 | | 4135 |
| GAG | AISPRTLNAW | 167 | 10 | 29 | 45 | | 4136 |
| GAG | ALSPRTLNAW | 167 | 10 | 10 | 16 | | 4137 |
| GAG | RTLNAWVKVI | 171 | 10 | 30 | 47 | | 4138 |
| GAG | WVKVIEEKAF | 176 | 10 | 24 | 38 | | 4139 |
| GAG | WVKVVEEKAF | 176 | 10 | 28 | 44 | | 4140 |
| GAG | AFSPEVIPMF | 184 | 10 | 50 | 78 | 0.0078 | 4141 |
| GAG | ATPQDLNMML | 200 | 10 | 12 | 19 | | 4142 |
| GAG | ATPQDLNTML | 200 | 10 | 42 | 66 | | 4143 |
| GAG | NIVGGIIQAAM | 210 | 10 | 12 | 19 | | 4144 |
| GAG | NTVGGIIQAAM | 210 | 10 | 47 | 73 | | 4145 |
| GAG | DTINEEAAEW | 224 | 10 | 31 | 48 | | 4146 |
| GAG | ETINEEAAEW | 224 | 10 | 22 | 34 | | 4147 |
| GAG | RLIIPVIIAGPI | 235 | 10 | 22 | 34 | | 4148 |
| GAG | RVIIPVIIAGPI | 235 | 10 | 14 | 22 | | 4149 |
| GAG | QMREPRGSDI | 248 | 10 | 44 | 69 | | 4150 |
| GAG | GTTSTLQEQI | 259 | 10 | 45 | 70 | | 4151 |
| GAG | STLQEQIAWM | 262 | 10 | 12 | 19 | | 4152 |
| GAG | STLQEQIGWM | 262 | 10 | 27 | 42 | | 4153 |
| GAG | PVGDIYKRWI | 281 | 10 | 17 | 27 | | 4154 |
| GAG | PVGEIYKRWI | 281 | 10 | 40 | 63 | | 4155 |
| GAG | IYKRWIILGL | 285 | 10 | 54 | 84 | 0.0140 | 4156 |
| GAG | RWIILGLNKI | 288 | 10 | 56 | 88 | | 4157 |
| GAG | ILGLNKIVRM | 291 | 10 | 57 | 89 | | 4158 |
| GAG | IVRMYSPTSI | 297 | 10 | 14 | 22 | | 4159 |
| GAG | IVRMYSPVSI | 297 | 10 | 40 | 63 | | 4160 |
| GAG | MYSPTSILDI | 300 | 10 | 13 | 20 | | 4161 |
| GAG | MYSPVSILDI | 300 | 10 | 40 | 63 | | 4162 |
| GAG | DIKQGPKEPF | 308 | 10 | 19 | 30 | | 4163 |
| GAG | DIRQGPKEPF | 308 | 10 | 41 | 64 | | 4164 |
| GAG | PFRDYVDRFF | 316 | 10 | 35 | 55 | | 4165 |
| GAG | PFRDYVDRFY | 316 | 10 | 28 | 44 | | 4166 |
| GAG | DYVDRFFKTL | 319 | 10 | 27 | 42 | | 4167 |
| GAG | DYVDRFYKTL | 319 | 10 | 28 | 44 | 0.0010 | 4168 |
| GAG | DVKNWMTDT | 336 | 10 | 12 | 19 | | 4169 |
| GAG | DVKNWMTET | 336 | 10 | 11 | 17 | | 4170 |
| GAG | EVKNWMTETL | 336 | 10 | 25 | 39 | | 4171 |
| GAG | ATIMMQRGNF | 406 | 10 | 11 | 28 | | 4172 |
| GAG | CFNCGKEGIII | 425 | 10 | 27 | 42 | | 4173 |
| GAG | CINCGKEGIIL | 425 | 10 | 27 | 42 | | 4174 |
| GAG | TTPSQKQEPI | 522 | 10 | 09 | 45 | | 4175 |
| GAG | ETIDKDLYPL | 537 | 10 | 01 | 25 | | 4176 |
| GAG | RTENSLYPPL | 538 | 10 | 01 | 25 | | 4177 |
| GAG | LYPLASLKSL | 544 | 10 | 09 | 17 | | 4178 |
| GAG | SVLSGGKLDA | 6 | 11 | 15 | 23 | | 4179 |
| GAG | IVWASRELERF | 35 | 11 | 19 | 30 | | 4180 |
| GAG | LVWASRELER | 35 | 11 | 25 | 39 | | 4181 |
| GAG | ELERFALNPGL | 42 | 11 | 14 | 22 | | 4182 |
| GAG | ELERFAVNPGL | 42 | 11 | 15 | 23 | | 4183 |
| GAG | LLETSEGCRQI | 52 | 11 | 16 | 25 | | 4184 |
| GAG | RIEVKDTKEAL | 93 | 11 | 12 | 19 | | 4185 |
| GAG | NLQGQMVIIQA | 158 | 11 | 15 | 23 | | 4186 |
| GAG | MVIIQAISPRTL | 163 | 11 | 27 | 42 | | 4187 |
| GAG | AWVKVIEEKA | 175 | 11 | 24 | 38 | | 4188 |
| GAG | AWVKVVEEKA | 175 | 11 | 28 | 44 | | 4189 |
| GAG | ALSEGATPQDL | 195 | 11 | 58 | 91 | | 4190 |
| GAG | IVGGIIQAAMQ | 211 | 11 | 11 | 17 | | 4191 |
| GAG | TVGGIIQAAMQ | 211 | 11 | 47 | 73 | | 4192 |
| GAG | TTSTLQEQIA | 260 | 11 | 11 | 17 | | 4193 |
| GAG | TTSTLQEQIG | 260 | 11 | 27 | 43 | | 4194 |
| GAG | QIGWMTNNPPI | 267 | 11 | 18 | 29 | | 4195 |
| GAG | QIGWMISNPPI | 267 | 11 | 10 | 16 | | 4196 |
| GAG | PIPVGEIYKRW | 279 | 11 | 34 | 53 | | 4197 |
| GAG | PVGDIYKRWII | 281 | 11 | 17 | 27 | | 4198 |
| GAG | PVGEIYKRWII | 281 | 11 | 39 | 61 | | 4199 |
| GAG | DIYKRWIILGL | 284 | 11 | 17 | 27 | | 4200 |
| GAG | EIYKRWIILGL | 284 | 11 | 37 | 58 | | 4201 |
| GAG | IILGLNKIVRM | 290 | 11 | 56 | 88 | | 4202 |
| GAG | ILGLNKIVRMY | 291 | 11 | 57 | 89 | | 4203 |
| GAG | KIVRMYSPTSI | 296 | 11 | 14 | 22 | | 4204 |
| GAG | KIVRMYSPVSI | 296 | 11 | 39 | 61 | | 4205 |
| GAG | IVRMYSPTSIL | 297 | 11 | 14 | 22 | | 4206 |
| GAG | IVRMYSPVSIL | 297 | 11 | 40 | 63 | | 4207 |
| GAG | RMYSPTSILDI | 299 | 11 | 13 | 20 | | 4208 |
| GAG | RMYSPVSILDI | 299 | 11 | 18 | 59 | | 4209 |
| GAG | DVKNWMTDT | 336 | 11 | 12 | 19 | | 4210 |
| GAG | DVKNWMTET | 336 | 11 | 11 | 17 | | 4211 |
| GAG | EVKNWMTETL | 336 | 11 | 25 | 39 | | 4212 |
| GAG | ILKALGPAATL | 357 | 11 | 16 | 25 | | 4213 |
| GAG | ALGPAATLEE | 360 | 11 | 16 | 25 | | 4214 |
| GAG | ALGPGATLEE | 360 | 11 | 17 | 27 | | 4215 |
| GAG | ATAQQDLKGG | 392 | 11 | 01 | 50 | | 4216 |
| GAG | CWKCGKEGIIQ | 446 | 11 | 46 | 72 | | 4217 |
| GAG | PTAPPAESFGF | 495 | 11 | 10 | 16 | | 4218 |
| GAG | PTAPPEESFRF | 495 | 11 | 14 | 22 | | 4219 |
| GAG | PTAPPAESFRF | 507 | 11 | 02 | 67 | | 4220 |
| GAG | PTAPPPESFRF | 507 | 11 | 01 | 33 | | 4221 |
| GAG | LYPLASLKSLF | 544 | 11 | 09 | 17 | | 4222 |
| GAG | SLKSLFGNDPL | 551 | 11 | 12 | 19 | | 4223 |
| NEF | DLEKIIGAI | 57 | 8 | 14 | 22 | | 4224 |
| NEF | ATNADCAW | 71 | 8 | 12 | 22 | | 4225 |
| NEF | PVRPQVPL | 95 | 8 | 48 | 75 | | 4226 |
| NEF | PMTYKGAF | 105 | 8 | 12 | 19 | | 4227 |
| NEF | TYKGAFDL | 107 | 8 | 12 | 19 | | 4228 |
| NEF | AFDLSFFL | 111 | 11 | 18 | 28 | | 4229 |
| NEF | ALDLSIIFL | 111 | 8 | 11 | 17 | | 4230 |
| NEF | AVDLSIIFL | 111 | 8 | 15 | 23 | | 4231 |
| NEF | FLKEKGGL | 117 | 8 | 56 | 88 | | 4232 |
| NEF | DILDLWVY | 185 | 8 | 20 | 31 | | 4233 |
| NEF | EILDLWVY | 185 | 8 | 33 | 52 | | 4234 |
| NEF | WVYIITQGF | 191 | 8 | 13 | 20 | | 4235 |
| NEF | WVYIITQGY | 191 | 8 | 21 | 33 | | 4236 |
| NEF | VYIITQGFF | 192 | 8 | 13 | 20 | | 4237 |
| NEF | VYIITQGYF | 192 | 8 | 21 | 33 | | 4238 |
| NEF | FFPDWQNY | 199 | 8 | 17 | 27 | | 4239 |
| NEF | YFPDWQNY | 199 | 8 | 36 | 56 | | 4240 |
| NEF | NYTPGPGI | 206 | 8 | 20 | 31 | | 4241 |
| NEF | GIRYPLTF | 213 | 8 | 13 | 20 | | 4242 |
| NEF | GTRFPLTF | 213 | 8 | 13 | 20 | | 4243 |
| NEF | RFPLTFGW | 216 | 8 | 20 | 32 | | 4244 |
| NEF | RYPLTFGW | 216 | 8 | 27 | 43 | | 4245 |
| NEF | PLTFGWCF | 219 | 8 | 43 | 67 | | 4246 |
| NEF | TFGWCFKL | 222 | 8 | 40 | 63 | | 4247 |
| NEF | GVGAASQDL | 45 | 9 | 11 | 17 | | 4248 |
| NEF | GVGAVSQDL | 45 | 9 | 21 | 33 | | 4249 |
| NEF | GVGAVSRDL | 45 | 9 | 17 | 27 | | 4250 |
| NEF | ATNADCAWL | 71 | 9 | 12 | 22 | | 4251 |
| NEF | QVPLRPMTF | 100 | 9 | 10 | 16 | | 4252 |
| NEF | QVPLRPMTY | 100 | 9 | 46 | 72 | | 4253 |
| NEF | MTYKGAFDL | 106 | 9 | 12 | 19 | | 4254 |
| NEF | FFLKEKGGL | 116 | 9 | 26 | 41 | | 4255 |
| NEF | IIFLKEKGGL | 116 | 9 | 29 | 45 | | 4256 |
| NEF | IYSKKRQEI | 175 | 9 | 18 | 29 | | 4257 |
| NEF | LWVYIITQGF | 190 | 9 | 13 | 20 | | 4258 |
| NEF | LWVYIIIQGY | 190 | 9 | 21 | 33 | | 4259 |
| NEF | WVYIITQGFF | 191 | 9 | 13 | 20 | | 4260 |
| NEF | WVYIITQGYF | 191 | 9 | 21 | 33 | | 4261 |
| NEF | FITQGFFPDW | 194 | 9 | 14 | 22 | | 4262 |
| NEF | IITQGYFPDW | 194 | 9 | 25 | 39 | | 4263 |
| NEF | NTQGYFPDW | 194 | 9 | 12 | 19 | | 4264 |
| NEF | CFFPDWQNY | 198 | 9 | 17 | 27 | | 4265 |
| NEF | GYFPDWQNY | 198 | 9 | 36 | 56 | 0.0002 | 4266 |
| NEF | YTPGPGIRY | 207 | 9 | 17 | 27 | | 4267 |
| NEF | YTPGPGTRF | 207 | 9 | 13 | 20 | | 4268 |
| NEF | LTFGWCFKL | 221 | 9 | 39 | 61 | | 4269 |
| NEF | KWSKSSIVGW | 4 | 10 | 20 | 31 | | 4270 |
| NEF | GFPVRPQVPL | 93 | 10 | 48 | 75 | | 4271 |
| NEF | PMTYKGAFDL | 105 | 10 | 12 | 19 | | 4272 |
| NEF | SFFLKEKGGL | 115 | 10 | 22 | 34 | | 4273 |
| NEF | LIYSKKRQEI | 174 | 10 | 18 | 28 | | 4274 |
| NEF | IYSKKRQEIL | 175 | 10 | 18 | 29 | | 4275 |
| NEF | DLWVYIITQGF | 188 | 10 | 13 | 20 | | 4276 |
| NEF | DLWVYIITQGY | 188 | 10 | 21 | 33 | | 4277 |
| NEF | LWVYIITQGFF | 190 | 10 | 13 | 20 | | 4278 |
| NEF | LWVYIIIQGYF | 190 | 10 | 21 | 33 | | 4279 |
| NEF | NYTPGPGIRY | 206 | 10 | 17 | 27 | | 4280 |
| NEF | NYTPGPGTRF | 206 | 10 | 13 | 20 | | 4281 |
| NEF | GIRYPLTFGW | 213 | 10 | 13 | 20 | | 4282 |
| NEF | GTRFPLTFGW | 213 | 10 | 12 | 19 | | 4283 |
| NEF | RPPLTFGWCF | 216 | 10 | 17 | 27 | | 4284 |
| NEF | RYPLTFGWCF | 216 | 10 | 21 | 33 | | 4285 |
| NEF | PLTFGWCFKL | 219 | 10 | 39 | 61 | | 4286 |
| NEF | LLHPICQHGM | 257 | 10 | 10 | 16 | | 4287 |
| NEF | LLHPMSQHGM | 257 | 10 | 12 | 19 | | 4288 |
| NEF | FIMARELHPEY | 320 | 10 | 10 | 16 | | 4289 |
| NEF | NTAATNADCA | 68 | 11 | 12 | 19 | | 4290 |
| NEF | PVRPQVPLRP | 95 | 11 | 47 | 73 | | 4291 |
| NEF | PLRPMTYKGA | 102 | 11 | 12 | 19 | | 4292 |
| NEF | FLKEKGGLDGL | 117 | 11 | 26 | 41 | | 4293 |
| NEF | FLKEKGGLEGL | 117 | 11 | 29 | 45 | | 4294 |
| NEF | GLIYSKKRQEI | 173 | 11 | 18 | 28 | | 4295 |
| NEF | LIYSKKRQEIL | 174 | 11 | 18 | 28 | | 4296 |
| NEF | DLWVYHTQGF | 188 | 11 | 13 | 20 | | 4297 |
| NEF | DLWVYHTQGY | 188 | 11 | 21 | 33 | | 4298 |
| NEF | VYHTQGFFPD | 192 | 11 | 13 | 20 | | 4299 |
| NEF | VYHTQGYFPD | 192 | 11 | 21 | 33 | | 4300 |
| NEF | DWQNYTPGPG | 203 | 11 | 18 | 28 | | 4301 |
| NEF | YTPGPGIRYPL | 207 | 11 | 16 | 25 | | 4302 |
| NEF | YTPGPGTRFPL | 207 | 11 | 13 | 20 | | 4303 |
| NEF | CLLHPMSQIIG | 256 | 11 | 10 | 16 | | 4304 |
| NEF | HMARELHPEY | 320 | 11 | 10 | 16 | | 4305 |
| POL | FFREDLAF | 1 | 8 | 15 | 23 | | 4306 |
| POL | FFRENLAF | 1 | 8 | 41 | 64 | | 4307 |
| POL | GTLNCVQI | 80 | 8 | 01 | 33 | | 4308 |
| POL | PTFNFPQI | 80 | 8 | 01 | 33 | | 4309 |
| POL | NFVQITLW | 86 | 8 | 22 | 34 | | 4310 |
| POL | SFVQITLW | 86 | 8 | 23 | 36 | | 4311 |
| POL | ITLWQRVL | 90 | 8 | 47 | 73 | | 4312 |
| POL | TIKIGGQL | 99 | 8 | 17 | 27 | | 4313 |
| POL | TVKIGGQL | 99 | 8 | 11 | 17 | | 4314 |
| POL | TVLEDINL | 118 | 8 | 13 | 20 | | 4315 |
| POL | TVLEEINL | 118 | 8 | 15 | 23 | | 4316 |
| POL | DINLVGKW | 122 | 8 | 13 | 20 | | 4317 |
| POL | EINLVGKW | 122 | 8 | 12 | 19 | | 4318 |
| POL | MIGGIGCW | 133 | 8 | 62 | 97 | | 4319 |
| POL | GFIKVRQY | 139 | 8 | 53 | 83 | | 4320 |
| POL | KVRQYDQI | 142 | 8 | 41 | 64 | | 4321 |
| POL | EICGIIKAI | 152 | 8 | 19 | 30 | | 4322 |
| POL | EICGKKAI | 152 | 8 | 24 | 38 | | 4323 |
| POL | NIIGRNLL | 170 | 8 | 26 | 41 | | 4324 |
| POL | NIIGRNML | 170 | 8 | 31 | 48 | | 4325 |
| POL | LTQIGCTL | 177 | 8 | 42 | 66 | | 4326 |
| POL | LTQLGCTL | 177 | 8 | 15 | 23 | | 4327 |
| POL | QIGCTLNF | 179 | 8 | 41 | 64 | | 4328 |
| POL | QLGCTLNF | 179 | 8 | 16 | 25 | | 4329 |
| POL | PVKLKPGM | 195 | 8 | 56 | 88 | | 4330 |
| POL | KIKALTEI | 217 | 8 | 28 | 44 | | 4331 |
| POL | KIKALVEI | 217 | 8 | 15 | 23 | | 4332 |
| POL | LVEICTEM | 221 | 8 | 15 | 24 | | 4333 |
| POL | EMEKEGKI | 229 | 8 | 42 | 66 | | 4334 |
| POL | KIGVENVY | 238 | 8 | 51 | 80 | | 4335 |
| POL | RIGVENVY | 238 | 8 | 11 | 17 | | 4336 |
| POL | KWRKLVDF | 259 | 8 | 59 | 92 | | 4337 |
| POL | KLVDFREL | 262 | 8 | 63 | 98 | | 4338 |
| POL | FWEVQLGI | 276 | 8 | 57 | 89 | | 4339 |
| POL | GIVHVAGL | 282 | 8 | 56 | 89 | | 4340 |
| POL | VLDVGDAY | 297 | 8 | 60 | 94 | | 4341 |
| POL | SVVLDKDF | 306 | 8 | 18 | 28 | | 4342 |
| POL | DFRKYTAF | 312 | 8 | 42 | 66 | | 4343 |
| POL | GWKGSVAI | 341 | 8 | 59 | 92 | | 4344 |
| POL | MTKILEPF | 353 | 8 | 44 | 69 | | 4345 |
| POL | DIVIYQYM | 366 | 8 | 18 | 28 | | 4346 |
| POL | EIYIYQYM | 366 | 8 | 24 | 38 | | 4347 |
| POL | IYQYMDDL | 369 | 8 | 61 | 95 | | 4348 |
| POL | DLYVGSDL | 375 | 8 | 63 | 98 | | 4349 |
| POL | YVGSDLEI | 377 | 8 | 58 | 91 | | 4350 |
| POL | FLWMGYEL | 416 | 8 | 64 | 100 | | 4351 |
| POL | WTVQVIQL | 428 | 8 | 28 | 44 | | 4352 |
| POL | WTVQVIVL | 428 | 8 | 13 | 20 | | 4353 |
| POL | QLVEKDSW | 434 | 8 | 13 | 20 | | 4354 |
| POL | VLPEKDSW | 434 | 8 | 13 | 20 | | 4355 |
| POL | TVNDIQKL | 442 | 8 | 62 | 97 | | 4356 |
| POL | KLVGKLNW | 448 | 8 | 62 | 97 | | 4357 |
| POL | KLNWASQI | 452 | 8 | 61 | 95 | | 4358 |
| POL | KVKQLCKL | 464 | 8 | 29 | 45 | | 4359 |
| POL | KVRQLCKL | 464 | 8 | 19 | 30 | | 4360 |
| POL | LLRGAKAL | 471 | 8 | 30 | 47 | | 4361 |
| POL | LLRGTKAL | 471 | 8 | 24 | 38 | | 4362 |
| POL | ALTDIVPL | 477 | 8 | 21 | 33 | | 4363 |
| POL | ALTEVIPL | 477 | 8 | 16 | 25 | | 4364 |
| POL | PLTEEAEL | 483 | 8 | 30 | 47 | | 4365 |
| POL | ELAENREI | 491 | 8 | 57 | 89 | | 4366 |
| POL | YYDPSKDL | 510 | 8 | 43 | 67 | | 4367 |
| POL | KTGKYAKM | 542 | 8 | 19 | 30 | | 4368 |
| POL | KTGKYARM | 542 | 8 | 13 | 21 | | 4369 |
| POL | IITNDVKQL | 553 | 8 | 49 | 77 | | 4370 |
| POL | LTEAVQKI | 560 | 8 | 34 | 53 | | 4371 |
| POL | ATESIVIW | 568 | 8 | 19 | 30 | | 4372 |
| POL | IWGKIPKF | 574 | 8 | 11 | 17 | | 4373 |
| POL | IWGKTPKF | 574 | 8 | 48 | 75 | | 4374 |
| POL | ETWWTDYW | 591 | 8 | 10 | 16 | | 4375 |
| POL | DYWQATWI | 596 | 8 | 20 | 31 | | 4376 |
| POL | EYWQATWI | 596 | 8 | 37 | 58 | | 4377 |
| POL | TWIPEWEF | 601 | 8 | 52 | 81 | | 4378 |
| POL | EFVNTPPL | 607 | 8 | 54 | 84 | | 4379 |
| POL | NTPPLVKL | 610 | 8 | 57 | 89 | | 4380 |
| POL | LVKLWYQL | 614 | 8 | 58 | 91 | | 4381 |
| POL | PIVGAETP | 625 | 8 | 28 | 44 | | 4382 |
| POL | IVGAETFY | 626 | 8 | 28 | 44 | | 4383 |
| POL | TTNQKTEL | 664 | 8 | 55 | 86 | | 4384 |
| POL | KTELQAIY | 668 | 8 | 12 | 19 | | 4385 |
| POL | NIVTDSQY | 686 | 8 | 62 | 97 | | 4386 |
| POL | VTDSQYAL | 688 | 8 | 59 | 92 | | 4387 |
| POL | LIKKEKVY | 717 | 8 | 35 | 55 | | 4388 |
| POL | WVPAHKGI | 727 | 8 | 63 | 98 | | 4389 |
| POL | GIRKVLFL | 747 | 8 | 51 | 80 | | 4390 |
| POL | KVLFLDGI | 750 | 8 | 50 | 78 | | 4391 |
| POL | AMASDFNL | 773 | 8 | 45 | 70 | | 4392 |
| POL | QVDCSPGI | 805 | 8 | 57 | 89 | | 4393 |
| POL | CTHLEGKI | 817 | 8 | 35 | 55 | | 4394 |
| POL | IILEGKIIL | 819 | 8 | 31 | 48 | | 4395 |
| POL | IILEGKVIL | 819 | 8 | 23 | 36 | | 4396 |
| POL | AVIIVASGY | 828 | 8 | 59 | 92 | | 4397 |
| POL | GYIEAEVI | 834 | 8 | 54 | 84 | | 4398 |
| POL | ETGQETAY | 844 | 8 | 59 | 92 | | 4399 |
| POL | ILKLAGRW | 853 | 8 | 34 | 53 | | 4400 |
| POL | LLKLAGRW | 853 | 8 | 25 | 39 | | 4401 |
| POL | HTDNGSNF | 866 | 8 | 51 | 80 | | 4402 |
| POL | TTVKAACW | 876 | 8 | 15 | 23 | | 4403 |
| POL | AVKAACWW | 877 | 8 | 32 | 50 | | 4404 |
| POL | TVKAACWW | 877 | 8 | 24 | 38 | | 4405 |
| POL | GIKQEFGI | 886 | 8 | 22 | 34 | | 4406 |
| POL | GIQQEFGI | 886 | 8 | 11 | 17 | | 4407 |
| POL | IILKTAVQM | 923 | 8 | 57 | 89 | | 4408 |
| POL | AVQMAVPI | 927 | 8 | 60 | 94 | | 4409 |
| POL | NFKRKGGI | 936 | 8 | 60 | 94 | | 4410 |
| POL | GYSAGERI | 945 | 8 | 57 | 89 | | 4411 |
| POL | QIIKIQNF | 968 | 8 | 12 | 19 | | 4412 |
| POL | QITKIQNF | 968 | 8 | 35 | 55 | | 4413 |
| POL | KIQNFRVY | 971 | 8 | 52 | 81 | | 4414 |
| POL | IWKGPAKL | 986 | 8 | 36 | 56 | | 4415 |
| POL | LWKGPAKL | 986 | 8 | 19 | 30 | | 4416 |
| POL | VIQDNSDI | 1003 | 8 | 37 | 58 | | 4417 |
| POL | VIQDNSEI | 1003 | 8 | 12 | 19 | | 4418 |
| POL | PTRRELQVW | 30 | 9 | 13 | 20 | | 4419 |
| POL | GTTLNFPQI | 79 | 9 | 01 | 17 | | 4420 |
| POL | AISLSLPQI | 80 | 9 | 01 | 33 | | 4421 |
| POL | SFSFPQIPL | 84 | 9 | 14 | 22 | | 4422 |
| POL | QTTLWQRPL | 89 | 9 | 47 | 73 | | 4423 |
| POL | LWQRPLVTI | 92 | 9 | 21 | 33 | 0.0190 | 4424 |
| POL | VTIKIGGQL | 98 | 9 | 17 | 27 | | 4425 |
| POL | VTVKIGGQL | 98 | 9 | 11 | 17 | | 4426 |
| POL | DTGADDTVL | 112 | 9 | 61 | 95 | | 4427 |
| POL | DTVLEDINL | 117 | 9 | 13 | 20 | | 4428 |
| POL | DTVLEEINL | 117 | 9 | 14 | 22 | | 4429 |
| POL | KMIGGIGGF | 132 | 9 | 62 | 97 | 0.0011 | 4430 |
| POL | MIGGIGGFI | 133 | 9 | 62 | 97 | | 4431 |
| POL | KVRQYDQIL | 142 | 9 | 21 | 33 | | 4432 |
| POL | QYDQILIEI | 145 | 9 | 27 | 42 | | 4433 |
| POL | QYDQIPIEI | 145 | 9 | 12 | 19 | | 4434 |
| POL | LVGPTPVNI | 163 | 9 | 54 | 84 | | 4435 |
| POL | PVNIIGRNL | 168 | 9 | 26 | 41 | | 4436 |
| POL | PVNIIGRNM | 168 | 9 | 24 | 38 | | 4437 |
| POL | LLTQIGCTL | 176 | 9 | 21 | 33 | | 4438 |
| POL | MLTQIGCTL | 176 | 9 | 18 | 28 | | 4439 |
| POL | MLTQLGCTL | 176 | 9 | 10 | 16 | | 4440 |
| POL | TLNFPISPI | 183 | 9 | 61 | 97 | | 4441 |
| POL | PIETVPVKL | 190 | 9 | 53 | 83 | | 4442 |
| POL | QWPLTEEKI | 210 | 9 | 56 | 88 | | 4443 |
| POL | LTEEKIKAL | 213 | 9 | 56 | 88 | | 4444 |
| POL | ALVEICTEM | 220 | 9 | 15 | 23 | | 4445 |
| POL | PYNTPIFAI | 244 | 9 | 24 | 38 | | 4446 |
| POL | PYNTPVFAI | 244 | 9 | 37 | 58 | 0.0310 | 4447 |
| POL | ELNKRTQDF | 268 | 9 | 57 | 89 | | 4448 |
| POL | DFWEVQLGI | 275 | 9 | 56 | 88 | | 4449 |
| POL | TVLDVGDAY | 296 | 9 | 57 | 89 | | 4450 |
| POL | VLDVGDAYF | 297 | 9 | 60 | 94 | | 4451 |
| POL | PLDKDFRKY | 308 | 9 | 19 | 30 | | 4452 |
| POL | YTAFTIPSI | 316 | 9 | 37 | S8 | | 4453 |
| POL | SINNETPGI | 323 | 9 | 32 | 50 | | 4454 |
| POL | STNNETPGI | 323 | 9 | 11 | 17 | | 4455 |
| POL | ETPGIRYQY | 327 | 9 | 52 | 81 | | 4456 |
| POL | GIRYQYNVL | 330 | 9 | 52 | 81 | | 4457 |
| POL | QYNVLPQGW | 334 | 9 | 63 | 98 | 0.0036 | 4458 |
| POL | GWKGSPAIF | 341 | 9 | 59 | 92 | | 4459 |
| POL | IFQSSMTKI | 348 | 9 | 38 | 59 | 0.0029 | 4460 |
| POL | SMTKILEPF | 352 | 9 | 43 | 67 | 0.0110 | 4461 |
| POL | PFRKQNPDI | 359 | 9 | 16 | 25 | | 4462 |
| POL | VIYQYMDDL | 368 | 9 | 51 | 80 | | 4463 |
| POL | IYQYMDDLY | 369 | 9 | 61 | 95 | 0.0130 | 4464 |
| POL | LYVGSDLEI | 376 | 9 | 58 | 91 | | 4465 |
| POL | EIGQIIRAKI | 383 | 9 | 26 | 41 | | 4466 |
| POL | EIGQIIRTKI | 383 | 9 | 21 | 33 | | 4467 |
| POL | KIEELREIIL | 390 | 9 | 19 | 30 | | 4468 |
| POL | KIEELRQIIL | 390 | 9 | 17 | 27 | | 4469 |
| POL | ELREIILLKW | 393 | 9 | 17 | 27 | | 4470 |
| POL | ELRQIILLRW | 393 | 9 | 15 | 23 | | 4471 |
| POL | PFLWMGYEL | 415 | 9 | 64 | 100 | | 4472 |
| POL | GYELIIPDKW | 420 | 9 | 60 | 94 | 0.0001 | 4473 |
| POL | KWIVQPIQL | 427 | 9 | 28 | 44 | | 4474 |
| POL | KWTVQPIVL | 427 | 9 | 12 | 19 | | 4475 |
| POL | IVLPEKDSW | 433 | 9 | 13 | 20 | | 4476 |
| POL | WIVNDIQKL | 441 | 9 | 62 | 97 | | 4477 |
| POL | DIQKLVGKL | 445 | 9 | 62 | 97 | | 4478 |
| POL | KLNWASQIY | 452 | 9 | 60 | 94 | | 4479 |
| POL | KVKQLCKLL | 464 | 9 | 28 | 44 | | 4480 |
| POL | KVRQLCKLL | 464 | 9 | 19 | 30 | | 4481 |
| POL | KLLRGAKAL | 470 | 9 | 25 | 40 | | 4482 |
| POL | KLLRGTKAL | 470 | 9 | 24 | 38 | | 4483 |
| POL | GTKALTEVI | 474 | 9 | 11 | 17 | | 4484 |
| POL | LTEEAELEL | 484 | 9 | 37 | 58 | | 4485 |
| POL | ELAENREIL | 491 | 9 | 57 | 89 | | 4486 |
| POL | VYYDPSKDL | 509 | 9 | 39 | 61 | 0.0004 | 4487 |
| POL | YYDPSKDLI | 510 | 9 | 35 | 55 | | 4488 |
| POL | TYQIYQEPF | 530 | 9 | 42 | 66 | 0.3000 | 4489 |
| POL | IYQEPIKNL | 533 | 9 | 40 | 63 | 0.0520 | 4490 |
| POL | QLTEAVQKI | 559 | 9 | 34 | 53 | | 4491 |
| POL | KIATESIVI | 566 | 9 | 14 | 22 | | 4492 |
| POL | VIWGKTPKF | 573 | 9 | 47 | 73 | | 4493 |
| POL | KTPKFKLPI | 577 | 9 | 17 | 27 | | 4494 |
| POL | KTPKFRLPI | 577 | 9 | 29 | 45 | | 4495 |
| POL | KLPIQKETW | 582 | 9 | 20 | 31 | | 4496 |
| POL | RLPIQKETW | 582 | 9 | 26 | 41 | | 4497 |
| POL | TWETWWTDY | 589 | 9 | 10 | 16 | | 4498 |
| POL | TWETWWTEY | 589 | 9 | 10 | 16 | | 4499 |
| POL | WTDYWQATW | 594 | 9 | 14 | 22 | | 4500 |
| POL | WTEYWQATW | S94 | 9 | 24 | 38 | | 4501 |
| POL | ATWIPEWEF | 600 | 9 | 52 | 81 | | 4502 |
| POL | NTPPLVKLW | 610 | 9 | 57 | 89 | | 4503 |
| POL | PLVKLWYQL | 613 | 9 | 54 | 84 | | 4504 |
| POL | WYQLEKDPI | 618 | 9 | 14 | 22 | | 4505 |
| POL | WYQLEKEPI | 618 | 9 | 31 | 48 | 0.0001 | 4506 |
| POL | WYQLETEPI | 618 | 9 | 11 | 17 | | 4507 |
| POL | PIVGAETFY | 625 | 9 | 28 | 44 | | 4508 |
| POL | ETKLCKACY | 641 | 9 | 35 | 55 | | 4509 |
| POL | DTTNQKTEL | 663 | 9 | 26 | 41 | | 4510 |
| POL | ETTNQKTEL | 663 | 9 | 29 | 45 | | 4511 |
| POL | KTELQAIIIL | 668 | 9 | 15 | 23 | | 4512 |
| POL | KTCLQAIYL | 668 | 9 | 12 | 19 | | 4513 |
| POL | ELQAIIILAL | 670 | 9 | 16 | 25 | | 4514 |
| POL | ELQAIYLAL | 670 | 9 | 12 | 19 | | 4515 |
| POL | IILALQDSGL | 675 | 9 | 15 | 23 | | 4516 |
| POL | IVTDSQYAL | 687 | 9 | 59 | 92 | | 4517 |
| POL | LVNQIIEQL | 709 | 9 | 19 | 30 | | 4518 |
| POL | LVSQIIEQL | 709 | 9 | 19 | 30 | | 4519 |
| POL | QLIKKEKVY | 716 | 9 | 28 | 44 | | 4520 |
| POL | LIKKEKVYL | 717 | 9 | 35 | 55 | | 4521 |
| POL | AWVPAIIKGI | 726 | 9 | 22 | 34 | | 4522 |
| POL | SWVPAIIKGI | 726 | 9 | 37 | 58 | | 4523 |
| POL | KYIISNWRAM | 766 | 9 | 28 | 44 | | 4524 |
| POL | RYIISNWRAM | 766 | 9 | 11 | 17 | | 4525 |
| POL | NWRAMASDF | 770 | 9 | 43 | 67 | 0.0016 | 4526 |
| POL | QVDCSPGIW | 805 | 9 | 57 | 89 | | 4527 |
| POL | IWQLDCTIIL | 812 | 9 | 59 | 92 | 0.0095 | 4528 |
| POL | CTIILEGKII | 817 | 9 | 35 | 55 | | 4529 |
| POL | CTIILEGKVI | 817 | 9 | 26 | 41 | | 4530 |
| POL | AVIIVASGYI | 828 | 9 | 53 | 83 | | 4531 |
| POL | ETGQETAYF | 844 | 9 | 57 | 89 | | 4532 |
| POL | ETAYFILKL | 848 | 9 | 31 | 48 | | 4533 |
| POL | ETAYFLLKL | 848 | 9 | 27 | 42 | | 4534 |
| POL | FILKLAGRW | 852 | 9 | 32 | 50 | | 4535 |
| POL | FLLKLAGRW | 852 | 9 | 25 | 39 | | 4536 |
| POL | STTVKAACW | 875 | 9 | 15 | 23 | | 4537 |
| POL | TTVKAACWW | 876 | 9 | 15 | 23 | | 4538 |
| POL | WWAGIKQEF | 883 | 9 | 21 | 33 | 0.0120 | 4539 |
| POL | WWAGIQQEF | 883 | 9 | 11 | 17 | | 4540 |
| POL | VVESMNKEL | 902 | 9 | 48 | 75 | | 4541 |
| POL | SMNKELKKI | 905 | 9 | 53 | 83 | | 4542 |
| POL | QVRDQAEHL | 916 | 9 | 48 | 75 | | 4543 |
| POL | QVREQAEIIL | 916 | 9 | 13 | 20 | | 4544 |
| POL | KTAVQMAVF | 925 | 9 | 57 | 89 | | 4545 |
| POL | QMAVFIIINF | 929 | 9 | 60 | 94 | 0.0190 | 4546 |
| POL | GYSAGERII | 945 | 9 | 41 | 64 | | 4547 |
| POL | IIDIIASDI | 952 | 9 | 12 | 19 | | 4548 |
| POL | IIDIIATDI | 952 | 9 | 29 | 45 | | 4549 |
| POL | IVDIIATDI | 952 | 9 | 12 | 19 | | 4550 |
| POL | ATDIQTKEL | 957 | 9 | 35 | 55 | | 4551 |
| POL | QTKELQKQI | 961 | 9 | 46 | 72 | | 4552 |
| POL | ELQKQIIKI | 964 | 9 | 13 | 21 | | 4553 |
| POL | ELQKQITKI | 964 | 9 | 34 | S4 | | 4554 |
| POL | KIQNFRVYY | 971 | 9 | 52 | 81 | | 4555 |
| POL | YYRDSRDPI | 978 | 9 | 34 | 53 | | 4556 |
| POL | YYRDSRDPL | 978 | 9 | 14 | 22 | | 4557 |
| POL | PIWKGPAKL | 985 | 9 | 36 | 56 | | 4558 |
| POL | PLWKGPAKL | 985 | 9 | 19 | 30 | | 4559 |
| POL | IWKGPAKLL | 986 | 9 | 35 | 55 | | 4560 |
| POL | LWKGPAKLL | 986 | 9 | 18 | 28 | | 4561 |
| POL | VVIQDNSDI | 1002 | 9 | 37 | 58 | | 4562 |
| POL | VVIQDNSEI | 1002 | 9 | 12 | 19 | | 4563 |
| POL | VVPRRKAKI | 1012 | 9 | 51 | 80 | | 4564 |
| POL | VVPRRKVKI | 1012 | 9 | 11 | 17 | | 4565 |
| POL | IIKDYGKQM | 1020 | 9 | 11 | 17 | | 4566 |
| POL | IIRDYGKQM | 1020 | 9 | 50 | 78 | | 4567 |
| POL | AFPQGEAREF | 7 | 10 | 10 | 16 | | 4568 |
| POL | STNSPTSREL | 32 | 10 | 01 | 33 | | 4569 |
| POL | GTLNCPQITL | 80 | 10 | 01 | 33 | | 4570 |
| POL | PTFNFPQIIL | 80 | 10 | 01 | 33 | | 4571 |
| POL | SFSFPQITLW | 84 | 10 | 13 | 20 | | 4572 |
| POL | TLWQRPLVTI | 91 | 10 | 21 | 33 | | 4573 |
| POL | LVTIKIGGQL | 97 | 10 | 13 | 20 | | 4574 |
| POL | KIGCQLKEAL | 101 | 10 | 23 | 36 | | 4575 |
| POL | NLPGKWKPKM | 124 | 10 | 35 | 55 | | 4576 |
| POL | KWKPKMIGGI | 128 | 10 | 42 | 66 | | 4577 |
| POL | RWKPKMIGGI | 128 | 10 | 17 | 27 | | 4578 |
| POL | KMIGGIGGFI | 132 | 10 | 62 | 97 | 0.0001 | 4579 |
| POL | FIKVRQYDQI | 140 | 10 | 41 | 64 | | 4580 |
| POL | KVRQYDQILI | 142 | 10 | 20 | 31 | | 4581 |
| POL | KVRQYDQIPI | 142 | 10 | 13 | 20 | | 4582 |
| POL | LIEICGIIKAI | 150 | 10 | 10 | 16 | | 4583 |
| POL | LIEICGKKAI | 150 | 10 | 13 | 20 | | 4584 |
| POL | VLVGPTPVNI | 162 | 10 | 53 | 83 | | 4585 |
| POL | LVGPIPVNLL | 163 | 10 | 52 | 81 | | 4586 |
| POL | PVNIIGRNLL | 168 | 10 | 26 | 41 | | 4587 |
| POL | PVNIIGRNML | 168 | 10 | 24 | 38 | | 4588 |
| POL | IIGRNLLIQI | 171 | 10 | 21 | 33 | | 4589 |
| POL | IIGRNMLTQI | 171 | 10 | 18 | 28 | | 4590 |
| POL | IIGRNMLTQL | 171 | 10 | 11 | 17 | | 4591 |
| POL | NLLTQIGCTL | 175 | 10 | 21 | 33 | | 4592 |
| POL | NMLTQIGCTL | 175 | 10 | 18 | 28 | | 4593 |
| POL | NMLTQLGCTL | 175 | 10 | 10 | 16 | | 4594 |
| POL | LTQIGCTLNF | 177 | 10 | 41 | 64 | | 4595 |
| POL | LTQLGCTLNF | 177 | 10 | 15 | 23 | | 4596 |
| POL | QIGCTLNFPI | 179 | 10 | 41 | 64 | | 4597 |
| POL | QLGCTLNFPI | 179 | 10 | 16 | 25 | | 4598 |
| POL | CTLNFPISPI | 182 | 10 | 60 | 94 | | 4599 |
| POL | TVPVKLKPGM | 193 | 10 | 54 | 84 | | 4600 |
| POL | GMDGPKVKQ | 201 | 10 | 51 | 80 | | 4601 |
| POL | PLTEEKIKAL | 212 | 10 | 54 | 84 | | 4602 |
| POL | CTEMEKEGKI | 225 | 10 | 27 | 42 | | 4603 |
| POL | AIKKKDSTKW | 251 | 10 | 57 | 89 | | 4604 |
| POL | STKWRKLVDF | 257 | 10 | 58 | 91 | | 4605 |
| POL | ELNKRTQDFW | 268 | 10 | 57 | 89 | | 4606 |
| POL | RTQDFWEVQL | 272 | 10 | 53 | 83 | | 4607 |
| POL | QLGIPIIPAGL | 280 | 10 | 56 | 89 | | 4608 |
| POL | VTVLDVGDAY | 295 | 10 | 56 | 88 | | 4609 |
| POL | TVLDVCDAYF | 296 | 10 | 57 | 89 | | 4610 |
| POL | YFSVPLDKDF | 304 | 10 | 18 | 29 | | 4611 |
| POL | DFRKYTAFTI | 312 | 10 | 42 | 66 | | 4612 |
| POL | KYTAFTIPSI | 315 | 10 | 37 | 58 | | 4613 |
| POL | AIFQSSMTKI | 347 | 10 | 36 | 56 | | 4614 |
| POL | IFQSSMTKIL | 348 | 10 | 38 | 59 | 0.0002 | 4615 |
| POL | IVIYQYMDDL | 367 | 10 | 42 | 66 | | 4616 |
| POL | VIYQYMDDLY | 368 | 10 | 51 | 80 | | 4617 |
| POL | DLYVGSDLEI | 375 | 10 | 58 | 91 | | 4618 |
| POL | KIEELREIILL | 390 | 10 | 19 | 30 | | 4619 |
| POL | KIEELRQIILL | 390 | 10 | 17 | 27 | | 4620 |
| POL | PIQLPEKDSW | 432 | 10 | 13 | 20 | | 4621 |
| POL | PIVLPEKDSW | 432 | 10 | 13 | 20 | | 4622 |
| POL | SWTVNDIQKL | 440 | 10 | 54 | 84 | | 4623 |
| POL | NWASQIYAGI | 454 | 10 | 27 | 42 | | 4624 |
| POL | NWASQIYPGI | 454 | 10 | 29 | 45 | | 4625 |
| POL | IYAGIKVKQL | 459 | 10 | 18 | 28 | | 4626 |
| POL | IYPGIKVKQL | 459 | 10 | 11 | 17 | | 4627 |
| POL | IYPGIKVRQL | 459 | 10 | 15 | 23 | | 4628 |
| POL | GIKVKQLCKL | 462 | 10 | 28 | 44 | | 4629 |
| POL | GIKVRQLCKL | 462 | 10 | 18 | 28 | | 4630 |
| POL | IVPLTEEAEL | 481 | 10 | 13 | 20 | | 4631 |
| POL | VIPLTEEAEL | 481 | 10 | 11 | 17 | | 4632 |
| POL | PLTEEAELEL | 483 | 10 | 30 | 47 | | 4633 |
| POL | ELELAENREI | 489 | 10 | 53 | 83 | | 4634 |
| POL | ILKEPVIIGVY | 498 | 10 | 40 | 63 | | 4635 |
| POL | GVYYDPSKDL | 508 | 10 | 38 | 59 | | 4636 |
| POL | VYYDPSKDLI | 509 | 10 | 31 | 48 | 0.0150 | 4637 |
| POL | EIQKQGQDQW | 520 | 10 | 13 | 20 | | 4638 |
| POL | EIQKQGQGQW | 520 | 10 | 15 | 23 | | 4639 |
| POL | WTYQIYQEPF | 529 | 10 | 42 | 66 | | 4640 |
| POL | QIYQEPFKNL | 532 | 10 | 40 | 63 | | 4641 |
| POL | PFKNLKTGKY | 537 | 10 | 45 | 70 | | 4642 |
| POL | NLKTGKYAKM | 540 | 10 | 18 | 29 | | 4643 |
| POL | NLKTGKYARM | 540 | 10 | 13 | 21 | | 4644 |
| POL | AVQKIATESI | 563 | 10 | 10 | 16 | | 4645 |
| POL | KIATESIVIW | 566 | 10 | 14 | 22 | | 4646 |
| POL | IVIWGKTPKF | 572 | 10 | 47 | 73 | | 4647 |
| POL | IWGKTPKFKL | 574 | 10 | 17 | 27 | | 4648 |
| POL | IWGKTPKFRL | 574 | 10 | 30 | 47 | | 4649 |
| POL | PIQKETWEAW | 584 | 10 | 15 | 23 | | 4650 |
| POL | PIQKETWETW | 584 | 10 | 27 | 42 | | 4651 |
| POL | ETWETWWTD | 588 | 10 | 10 | 16 | | 4652 |
| POL | ETWETWWTE | 588 | 10 | 10 | 16 | | 4653 |
| POL | TWETWWTDY | 589 | 10 | 10 | 16 | | 4654 |
| POL | WWTDYWQAT | 593 | 10 | 14 | 22 | | 4655 |
| POL | WWTEYWQAT | 593 | 10 | 23 | 36 | | 4656 |
| POL | WTDYWQATW | 594 | 10 | 14 | 22 | | 4657 |
| POL | WTEYWQATW | 594 | 10 | 24 | 38 | | 4658 |
| POL | YWQATWIPE | 597 | 10 | 52 | 81 | 0.0660 | 4659 |
| POL | EWEFVNTPPL | 605 | 10 | 50 | 78 | | 4660 |
| POL | FVNTPPLVKL | 608 | 10 | 54 | 86 | | 4661 |
| POL | NTPPLVKLWY | 610 | 10 | 57 | 89 | | 4662 |
| POL | LWYQLEKDPI | 617 | 10 | 14 | 22 | | 4663 |
| POL | LWYQLEKEPI | 617 | 10 | 31 | 48 | | 4664 |
| POL | LWYQLETEPI | 617 | 10 | 11 | 17 | | 4665 |
| POL | EVNIVTDSQY | 684 | 10 | 59 | 92 | | 4666 |
| POL | NIVTDSQYAL | 686 | 10 | 59 | 92 | | 4667 |
| POL | VTDSQYALGI | 688 | 10 | 58 | 91 | | 4668 |
| POL | ELVNQIIEQL | 708 | 10 | 18 | 28 | | 4669 |
| POL | ELVSQIIEQL | 708 | 10 | 19 | 30 | | 4670 |
| POL | LVNQIIEQLI | 709 | 10 | 19 | 30 | | 4671 |
| POL | LVSQIIEQLI | 709 | 10 | 19 | 30 | | 4672 |
| POL | QLIKKEKVYL | 716 | 10 | 28 | 44 | | 4673 |
| POL | QVDKLVSAGI | 739 | 10 | 15 | 23 | | 4674 |
| POL | QVDKLVSSGI | 739 | 10 | 29 | 45 | | 4675 |
| POL | LVSAGIRKVL | 743 | 10 | 15 | 23 | | 4676 |
| POL | LVSSGIRKVL | 743 | 10 | 26 | 41 | | 4677 |
| POL | NLPPIVAKCI | 779 | 10 | 26 | 41 | | 4678 |
| POL | NLPPVVAKEI | 779 | 10 | 27 | 42 | | 4679 |
| POL | IVASCDKCQL | 788 | 10 | 43 | 67 | | 4680 |
| POL | GIWQLDCTHL | 811 | 10 | 59 | 92 | | 4681 |
| POL | CTIILEGKIIL | 817 | 10 | 31 | 48 | | 4682 |
| POL | CTIILEGKVIL | 817 | 10 | 23 | 36 | | 4683 |
| POL | LYAVIIVASGY | 826 | 10 | 53 | 83 | | 4684 |
| POL | ETGQETAYFI | 844 | 10 | 31 | 48 | | 4685 |
| POL | EIGQETAYFL | 844 | 10 | 26 | 41 | | 4686 |
| POL | YFILKLAGRW | 851 | 10 | 31 | 48 | | 4687 |
| POL | YPLLKLAGRW | 851 | 10 | 25 | 39 | | 4688 |
| POL | TIIITDNGSNF | 864 | 10 | 14 | 22 | | 4689 |
| POL | VIIITDNGSNF | 864 | 10 | 24 | 38 | | 4690 |
| POL | STTVKAACW | 875 | 10 | 15 | 23 | | 4691 |
| POL | CWWAGIKQEF | 882 | 10 | 21 | 33 | | 4692 |
| POL | CWWAGIQQEF | 882 | 10 | 11 | 17 | | 4693 |
| POL | GIKQEFGIPY | 886 | 10 | 22 | 34 | | 4694 |
| POL | GIQQEFGIPY | 886 | 10 | 11 | 17 | | 4695 |
| POL | GVVESMNKEL | 901 | 10 | 48 | 75 | | 4696 |
| POL | SMNKELKKII | 905 | 10 | 53 | 83 | | 4697 |
| POL | KTAVQMAVFI | 925 | 10 | 56 | 88 | | 4698 |
| POL | RIIDIIASDI | 951 | 10 | 12 | 19 | | 4699 |
| POL | RIIDIIATDI | 951 | 10 | 29 | 4S | | 4700 |
| POL | RIVDIIATDI | 951 | 10 | 12 | 19 | | 4701 |
| POL | QTKELQKQII | 961 | 10 | 10 | 16 | | 4702 |
| POL | IIKIQNFRVY | 969 | 10 | 12 | 19 | | 4703 |
| POL | ITKIQNFRVY | 969 | 10 | 36 | 57 | | 4704 |
| POL | VYYRDSRDPI | 977 | 10 | 34 | 53 | | 4705 |
| POL | VYYRDSRDPL | 977 | 10 | 14 | 22 | | 4706 |
| POL | YYRDSRDPIW | 978 | 10 | 34 | 53 | | 4707 |
| POL | YYRDSRDPLW | 978 | 10 | 14 | 22 | | 4708 |
| POL | PIWKGPAKLL | 985 | 10 | 35 | 55 | | 4709 |
| POL | PLWKGPAKLL | 985 | 10 | 18 | 28 | | 4710 |
| POL | IWKGPAKLLW | 986 | 10 | 35 | 55 | | 4711 |
| POL | LWKGPAKLLW | 986 | 10 | 18 | 28 | | 4712 |
| POL | LWKGEGAVVI | 994 | 10 | 59 | 92 | | 4713 |
| POL | AVVIQDNSDI | 1000 | 10 | 37 | 58 | | 4714 |
| POL | AVVIQDNSEI | 1000 | 10 | 12 | 19 | | 4715 |
| POL | KVVPRRKAKI | 1011 | 10 | 51 | 80 | | 4716 |
| POL | KVVPRRKVKI | 1011 | 10 | 11 | 17 | | 4717 |
| POL | VVPRRKAKII | 1012 | 10 | 50 | 78 | | 4718 |
| POL | VVPRRKVKII | 1012 | 10 | 11 | 17 | | 4719 |
| POL | KIIKDYGKQM | 1019 | 10 | 11 | 17 | | 4720 |
| POL | KIIRDYGKQM | 1019 | 10 | 50 | 78 | | 4721 |
| POL | LGTILNFPQITF | 79 | 11 | 01 | 17 | | 4722 |
| POL | AISLSLPQITL | 80 | 11 | 01 | 33 | | 4723 |
| POL | GTLNCPQITL | 80 | 11 | 01 | 33 | | 4724 |
| POL | PTFNFPQITLW | 80 | 11 | 01 | 33 | | 4725 |
| POL | ITLWQRPLVTI | 90 | 11 | 19 | 30 | | 4726 |
| POL | LWQRPLVIIKI | 92 | 11 | 14 | 22 | | 4727 |
| POL | LWQRPLVTVK | 92 | 11 | 12 | 19 | | 4728 |
| POL | PLVTIKIGGQL | 96 | 11 | 13 | 20 | | 4729 |
| POL | KIGGQLKEALL | 101 | 11 | 23 | 36 | | 4730 |
| POL | LLDTGADDTV | 110 | 11 | 61 | 95 | | 4731 |
| POL | VLEDINLPGKW | 119 | 11 | 13 | 20 | | 4732 |
| POL | VLEDINLPGKW | 119 | 11 | 12 | 19 | | 4733 |
| POL | NLPGKWKPKM | 124 | 11 | 35 | 55 | | 4734 |
| POL | GIGGFIKVRQY | 136 | 11 | 53 | 83 | | 4735 |
| POL | GFIKVRQYDQI | 139 | 11 | 41 | 64 | | 4736 |
| POL | FIKVRQYDQIL | 140 | 11 | 21 | 33 | | 4737 |
| POL | ILIDICGKKAI | 149 | 11 | 13 | 20 | | 4738 |
| POL | TVLVGPTPVNI | 161 | 11 | 53 | 83 | | 4739 |
| POL | VLVGPTPVNII | 162 | 11 | 51 | 80 | | 4740 |
| POL | PTPVNIIGRNL | 166 | 11 | 26 | 41 | | 4741 |
| POL | PTPVNIIGRNM | 166 | 11 | 24 | 38 | | 4742 |
| POL | NIIGRNLLTQI | 170 | 11 | 21 | 33 | | 4743 |
| POL | NIIGRNMLTQI | 170 | 11 | 18 | 28 | | 4744 |
| POL | NIIGRNMLIQL | 170 | 11 | 11 | 17 | | 4745 |
| POL | LLIQIGCTLNF | 176 | 11 | 21 | 33 | | 4746 |
| POL | MLTQIGCTLNF | 176 | 11 | 17 | 27 | | 4747 |
| POL | MLTQLGCTLN | 176 | 11 | 10 | 16 | | 4748 |
| POL | ETVPVKLKPG | 192 | 11 | 51 | 80 | | 4749 |
| POL | EMEKEGKISKI | 229 | 11 | 32 | 50 | | 4750 |
| POL | KISKIGPENPY | 235 | 11 | 41 | 64 | | 4751 |
| POL | KISRIGPENPY | 235 | 11 | 11 | 17 | | 4752 |
| POL | KWRKLVDFRE | 259 | 11 | 59 | 92 | | 4753 |
| POL | GLKKKKSVTV | 288 | 11 | 49 | 77 | | 4754 |
| POL | SVTVLDVGDA | 294 | 11 | 56 | 88 | | 4755 |
| POL | VTVLDVGDAY | 295 | 11 | 56 | 88 | | 4756 |
| POL | DVGDAYFSVP | 299 | 11 | 54 | 84 | | 4757 |
| POL | AYFSVPLDKDF | 303 | 11 | 18 | 28 | | 4758 |
| POL | SVPLDKDFRK | 306 | 11 | 18 | 28 | | 4759 |
| POL | SINNETPGIRY | 323 | 11 | 32 | 50 | | 4760 |
| POL | STNNETPGIRY | 323 | 11 | 11 | 17 | | 4761 |
| POL | RYQYNVLPQG | 332 | 11 | 63 | 98 | | 4762 |
| POL | AWQSSMTKIL | 347 | 11 | 36 | 56 | | 4763 |
| POL | PFRKQNPDIVI | 359 | 11 | 14 | 22 | | 4764 |
| POL | DIVIYQYMDDL | 366 | 11 | 18 | 28 | | 4765 |
| POL | EIVIYQYMDDL | 366 | 11 | 24 | 38 | | 4766 |
| POL | IVIYQYMDDLY | 367 | 11 | 42 | 66 | | 4767 |
| POL | YMDDLYVGSD | 372 | 11 | 61 | 95 | | 4768 |
| POL | DLEIGQIIRAKI | 381 | 11 | 26 | 41 | | 4769 |
| POL | DLEIGQIIRTKI | 381 | 11 | 20 | 31 | | 4770 |
| POL | RTKIEELRQIIL | 388 | 11 | 14 | 22 | | 4771 |
| POL | ELREIILLKWG | 393 | 11 | 14 | 22 | | 4772 |
| POL | ELRQIILLRWG | 393 | 11 | 12 | 39 | | 4773 |
| POL | WMGYELIIPDK | 418 | 11 | 60 | 94 | | 4774 |
| POL | DIQKLVGKLN | 445 | 11 | 62 | 97 | | 4775 |
| POL | LVGKLNWASQ | 449 | 11 | 60 | 94 | | 4776 |
| POL | QIYAGIKVKQL | 458 | 11 | 18 | 29 | | 4777 |
| POL | QIYPGIKVKQL | 458 | 11 | 11 | 17 | | 4778 |
| POL | QIYPGIKVRQL | 458 | 11 | 14 | 22 | | 4779 |
| POL | GIKVKQLCKLL | 462 | 11 | 27 | 42 | | 4780 |
| POL | GIKVRQLCKLL | 462 | 11 | 18 | 28 | | 4781 |
| POL | LLRGAKALTDI | 473 | 11 | 22 | 34 | | 4782 |
| POL | GTKALTEVIPL | 474 | 11 | 11 | 17 | | 4783 |
| POL | DIVPLTEEAEL | 480 | 11 | 13 | 20 | | 4784 |
| POL | EVIPLTEEAEL | 480 | 11 | 11 | 17 | | 4785 |
| POL | ELELAENREIL | 489 | 11 | 53 | 83 | | 4786 |
| POL | EILKEPVIIGVY | 497 | 11 | 40 | 63 | | 4787 |
| POL | ILKEPVIIGVYY | 498 | 11 | 38 | 59 | | 4788 |
| POL | GVYYDPSKDLI | 508 | 11 | 31 | 48 | | 4789 |
| POL | QWTYQIYQEP | 528 | 11 | 42 | 66 | | 4790 |
| POL | SIVIWGKTPKF | 571 | 11 | 41 | 64 | | 4791 |
| POL | VIWGKTPKFK | 573 | 11 | 17 | 27 | | 4792 |
| POL | VIWGKTPKPR | 573 | 11 | 29 | 45 | | 4793 |
| POL | KFKLPIQKETW | 580 | 11 | 20 | 31 | | 4794 |
| POL | KFRLPIQKETW | 580 | 11 | 26 | 41 | | 4795 |
| POL | PIQKETWEAW | 584 | 11 | 15 | 23 | | 4796 |
| POL | PIQKETWETW | 584 | 11 | 27 | 42 | | 4797 |
| POL | ETWETWWTD | 588 | 11 | 10 | 16 | | 4798 |
| POL | TWWTDYWQA | 592 | 11 | 10 | 16 | | 4799 |
| POL | TWWTEYWQA | 592 | 11 | 12 | 19 | | 4800 |
| POL | WWTDYWQAT | 593 | 11 | 14 | 22 | | 4801 |
| POL | WWTEYWQAT | 593 | 11 | 23 | 36 | | 4802 |
| POL | DYWQATWIPE | 596 | 11 | 19 | 30 | | 4803 |
| POL | EYWQATWIPE | 596 | 11 | 33 | 52 | | 4804 |
| POL | EFVNTPPLVKL | 607 | 11 | 54 | 84 | | 4805 |
| POL | FVNTPPLVKL | 608 | 11 | 54 | 86 | | 4806 |
| POL | KLWYQLEKDPI | 616 | 11 | 14 | 22 | | 4807 |
| POL | KLWYQLEKEPI | 616 | 11 | 31 | 48 | | 4808 |
| POL | KLWYQLETEPI | 616 | 11 | 11 | 17 | | 4809 |
| POL | LTDTTNQKTE | 661 | 11 | 19 | 30 | | 4810 |
| POL | LTETTNQKTE | 661 | 11 | 25 | 39 | | 4811 |
| POL | TTNQKTELIIAI | 664 | 11 | 12 | 19 | | 4812 |
| POL | TTNQKTELQAI | 664 | 11 | 42 | 66 | | 4813 |
| POL | KTELQAIIILAL | 668 | 11 | 15 | 23 | | 4814 |
| POL | KTELQAIYLAL | 668 | 11 | 12 | 19 | | 4815 |
| POL | AIIILALQDSGL | 673 | 11 | 15 | 23 | | 4816 |
| POL | ALQDSGLEVNI | 677 | 11 | 27 | 42 | | 4817 |
| POL | ALQDSGSEVNI | 677 | 11 | 25 | 39 | | 4818 |
| POL | IVTDSQYALGI | 687 | 11 | 58 | 91 | | 4819 |
| POL | VTDSQYALGII | 688 | 11 | 58 | 91 | | 4820 |
| POL | ELVNQIIEQLI | 708 | 11 | 18 | 28 | | 4821 |
| POL | ELVSQIIEQLI | 708 | 11 | 19 | 30 | | 4822 |
| POL | LIKKIEKVYLA | 717 | 11 | 20 | 31 | | 4823 |
| POL | LIKKEKVYLSW | 717 | 11 | 3 | 20 | | 4824 |
| POL | YLAWVPAIIKG | 724 | 11 | 22 | 34 | | 4825 |
| POL | YLSWVPAIIKG | 724 | 11 | 37 | 58 | | 4826 |
| POL | GIGGNCQVDKL | 733 | 11 | 58 | 91 | | 4827 |
| POL | KLVSAGIRKVL | 742 | 11 | 15 | 23 | | 4828 |
| POL | KLVSSGIRKVL | 742 | 11 | 26 | 41 | | 4829 |
| POL | LVSAGIRKVLF | 743 | 11 | 15 | 23 | | 4830 |
| POL | LVSSGIRKVLF | 743 | 11 | 26 | 41 | | 4831 |
| POL | IRKVLFLDGI | 747 | 11 | 49 | 77 | | 4832 |
| POL | NWRAMASDF | 770 | 11 | 41 | 64 | | 4833 |
| POL | AMASDFNLPPI | 773 | 11 | 18 | 28 | | 4834 |
| POL | EIVASCDKCQL | 787 | 11 | 43 | 67 | | 4835 |
| POL | QVDCSPGIWQ | 805 | 11 | 56 | 88 | | 4836 |
| POL | QLDCTIILEGKI | 814 | 11 | 33 | 52 | | 4837 |
| POL | ILVAVHVASGY | 825 | 11 | 53 | 83 | | 4838 |
| POL | LYAVIIVASGYI | 826 | 11 | 47 | 73 | | 4839 |
| POL | ETGQETAYFIL | 844 | 11 | 31 | 48 | | 4840 |
| POL | ETGQETAYFLL | 844 | 11 | 26 | 41 | | 4841 |
| POL | AYFILKLAGR | 850 | 11 | 31 | 48 | | 4842 |
| POL | AYFLLKLAGR | 850 | 11 | 25 | 39 | | 4843 |
| POL | KLAGRWPVKT | 855 | 11 | 13 | 20 | | 4844 |
| POL | KLAGRWPVKV | 855 | 11 | 22 | 34 | | 4845 |
| POL | KVIIITDNGSNF | 863 | 11 | 21 | 33 | | 4846 |
| POL | FTSAAVKAAC | 873 | 11 | 27 | 42 | | 4847 |
| POL | FTSTTVKAAC | 873 | 11 | 14 | 22 | | 4848 |
| POL | AVKAACWWA | 877 | 11 | 10 | 16 | | 4849 |
| POL | TVKAACWWA | 877 | 11 | 20 | 31 | | 4850 |
| POL | WWAGIKQEFG | 883 | 11 | 21 | 33 | | 4851 |
| POL | WWAGIQQEFG | 883 | 11 | 11 | 17 | | 4852 |
| POL | HLKTAVQMAV | 923 | 11 | 57 | 89 | | 4853 |
| POL | AVQMAVFIHN | 927 | 11 | 60 | 94 | | 4854 |
| POL | FIHNFKRKGGI | 933 | 11 | 58 | 91 | | 4855 |
| POL | NFKRKGGIGGY | 936 | 11 | 59 | 92 | | 4856 |
| POL | GIGGYSAGERI | 942 | 11 | 57 | 89 | | 4857 |
| POL | GYSAGERIIDI | 945 | 11 | 40 | 63 | | 4858 |
| POL | GYSAGERIVDI | 945 | 11 | 14 | 22 | | 4859 |
| POL | IIASDIQTKEL | 955 | 11 | 14 | 22 | | 4860 |
| POL | IIATDIQTKEL | 955 | 11 | 34 | 53 | | 4861 |
| POL | DIQTKELQKQI | 959 | 11 | 44 | 69 | | 4862 |
| POL | QIIKIQNFRVY | 968 | 11 | 12 | 19 | | 4863 |
| POL | QITKIQNFRVY | 968 | 11 | 35 | 55 | | 4864 |
| POL | IIKIQNFRVYY | 969 | 11 | 12 | 19 | | 4865 |
| POL | ITKIQNFRVYY | 969 | 11 | 36 | 57 | | 4866 |
| POL | RVYYRDSRDPI | 976 | 11 | 34 | 53 | | 4867 |
| POL | RVYYRDSRDP | 976 | 11 | 14 | 22 | | 4868 |
| POL | VYYRDSRDPI | 977 | 11 | 34 | 53 | | 4869 |
| POL | VYYRDSRDPL | 977 | 11 | 14 | 22 | | 4870 |
| POL | PIWKGPAKLL | 985 | 11 | 35 | 55 | | 4871 |
| POL | PLWKGPAKLL | 985 | 11 | 18 | 28 | | 4872 |
| POL | LLWKGEGAVV | 993 | 11 | 59 | 92 | | 4873 |
| POL | KVVPRRKAKII | 1011 | 11 | 50 | 78 | | 4874 |
| POL | KVVPRRKVKII | 1011 | 11 | 11 | 17 | | 4875 |
| REV | LLKTVRLI | 12 | 8 | 11 | 17 | | 4876 |
| REV | AVRIIKIL | 17 | 8 | 13 | 20 | | 4877 |
| REV | ILYQSNPY | 23 | 8 | 27 | 42 | | 4878 |
| REV | QLPPIERL | 78 | 8 | 14 | 22 | | 4879 |
| REV | QLPPLERL | 78 | 8 | 37 | 58 | | 4880 |
| REV | LVESPAVL | 114 | 8 | 11 | 17 | | 4881 |
| REV | AVRIIKILY | 17 | 9 | 13 | 20 | | 4882 |
| REV | KILYQSNPY | 22 | 9 | 26 | 41 | | 4883 |
| REV | RWRARQRQI | 48 | 9 | 35 | 55 | | 4884 |
| REV | RWRERQRQI | 48 | 9 | 11 | 17 | | 4885 |
| REV | PVPLQLPPI | 74 | 9 | 11 | 17 | | 4886 |
| REV | PVPLQLPPL | 74 | 9 | 35 | 55 | | 4887 |
| REV | PLQLPPIERL | 76 | 10 | 11 | 17 | | 4888 |
| REV | PLQLPPLERL | 76 | 10 | 34 | 53 | | 4889 |
| REV | QLPPLERLTL | 78 | 10 | 18 | 28 | | 4890 |
| REV | GTQGVGSPQI | 97 | 10 | 11 | 18 | | 4891 |
| REV | IIKILYQSNPY | 20 | 11 | 18 | 28 | | 4892 |
| TAT | CYCKKCCF | 28 | 8 | 11 | 17 | | 4893 |
| TAT | CYCKKCCY | 28 | 8 | 11 | 17 | | 4894 |
| TAT | CFIICQVCF | 34 | 8 | 11 | 17 | | 4895 |
| TAT | FLNKGLGI | 41 | 8 | 14 | 22 | | 4896 |
| TAT | PVDPNLEPW | 3 | 9 | 20 | 31 | | 4897 |
| TAT | PVDPRLEPW | 3 | 9 | 14 | 22 | | 4898 |
| TAT | CFLNKGLGI | 40 | 9 | 14 | 22 | | 4899 |
| TAT | FLNKGLGISY | 41 | 10 | 14 | 22 | | 4900 |
| TAT | CFLNKGLGISY | 40 | 11 | 14 | 22 | | 4901 |
| VIP | RWQVLIVW | 4 | 8 | 10 | 16 | | 4902 |
| VIP | RWQVMIVW | 4 | 8 | 43 | 67 | | 4903 |
| VIP | IVWQVDRM | 9 | 8 | 59 | 92 | | 4904 |
| VIP | KIRTWNSL | 17 | 8 | 12 | 19 | | 4905 |
| VIP | RIRTWKSL | 17 | 8 | 15 | 23 | | 4906 |
| VIP | RIRTWNSL | 17 | 8 | 15 | 23 | | 4907 |
| VIP | SLYKIIIIMY | 23 | 8 | 44 | 69 | | 4908 |
| VIP | LVKIIIIMYI | 24 | 8 | 19 | 30 | | 4909 |
| VIP | GWPYRIIIIY | 37 | 8 | 20 | 31 | | 4910 |
| VIP | KISSEVIII | 50 | 8 | 15 | 23 | | 4911 |
| VIP | KVSSIEVIII | 50 | 8 | 20 | 31 | | 4912 |
| VIP | RISSEVIII | 50 | 8 | 15 | 23 | | 4913 |
| VIP | RLVITTYW | 65 | 8 | 12 | 19 | | 4914 |
| VIP | VIKTYWGL | 67 | 8 | 10 | 16 | | 4915 |
| VIP | VIITYWGL | 67 | 8 | 22 | 34 | | 4916 |
| VIP | VVRTYWGL | 67 | 8 | 10 | 16 | | 4917 |
| VIP | VVYIYWGL | 67 | 8 | 11 | 17 | | 4918 |
| VIP | IILGIIGVSI | 83 | 8 | 25 | 39 | | 4919 |
| VIP | IILCAQGVSI | 83 | 8 | 26 | 41 | | 4920 |
| VIP | GVSIEWRL | 87 | 8 | 18 | 28 | | 4921 |
| VIP | STQIDPDL | 100 | 8 | 12 | 19 | | 4922 |
| VIP | STQVDPGL | 100 | 8 | 11 | 11 | | 4923 |
| VIP | QLIIILYYP | 110 | 8 | 14 | 22 | | 4924 |
| VIP | QLIIIMIIYF | 110 | 8 | 14 | 22 | | 4925 |
| VIP | IILYYPDCP | 113 | 8 | 16 | 25 | | 4926 |
| VIP | IIMIIYPDCP | 113 | 8 | 15 | 23 | | 4927 |
| VIP | IVSPRCEY | 133 | 8 | 14 | 22 | | 4928 |
| VIP | KVGSLQYL | 146 | 8 | 52 | 81 | | 4929 |
| VIP | QYLALAAL | 151 | 8 | 12 | 19 | | 4930 |
| VIP | QYLALKAL | 151 | 8 | 11 | 17 | | 4931 |
| VIP | QYLALTAL | 151 | 8 | 33 | 52 | | 4932 |
| VIP | YLALTALI | 152 | 8 | 28 | 44 | | 4933 |
| VIP | ALIKPKKI | 157 | 8 | 10 | 16 | | 4934 |
| VIP | PLPSVKKL | 168 | 8 | 21 | 33 | | 4935 |
| VIP | PLPSVRKL | 168 | 8 | 14 | 22 | | 4936 |
| VIP | MIVWQVDRM | 8 | 9 | 46 | 72 | | 4937 |
| VIP | VWQVDRMKI | 10 | 9 | 13 | 20 | | 4938 |
| VIP | VWQVDRMRI | 10 | 9 | 48 | 75 | | 4939 |
| VIP | SLYKIIIIMYI | 23 | 9 | 19 | 30 | | 4940 |
| VIP | IIIPLGDARL | 56 | 9 | 13 | 20 | | 4941 |
| VIP | IIIPLGEARL | 56 | 9 | 20 | 31 | | 4942 |
| VIP | PLGEARLVI | 58 | 9 | 10 | 16 | | 4943 |
| VIP | LVIKTYWGL | 66 | 9 | 10 | 16 | | 4944 |
| VIP | LVITTYWGL | 66 | 9 | 22 | 34 | | 4945 |
| VIP | GLIITGERDW | 73 | 9 | 22 | 34 | | 4946 |
| VIP | GLQTGERDW | 73 | 9 | 12 | 19 | | 4947 |
| VIP | IITGERDWIIL | 75 | 9 | 21 | 33 | | 4948 |
| VIP | QTGERDWIIL | 75 | 9 | 12 | 19 | | 4949 |
| VIP | SIEWRLRRY | 89 | 9 | 11 | 17 | | 4950 |
| VIP | DLADQLIIIL | 106 | 9 | 18 | 28 | | 4951 |
| VIP | GLADQLIIIM | 106 | 9 | 15 | 23 | | 4952 |
| VIP | QYLALTALI | 151 | 9 | 28 | 44 | | 4953 |
| VIP | VMIVWQVDR | 7 | 10 | 44 | 69 | | 4954 |
| VIP | IVWQVDRMKI | 9 | 10 | 12 | 19 | | 4955 |
| VIP | IVWQVDRMRI | 9 | 10 | 47 | 73 | | 4956 |
| VIP | QVDRMKIRTW | 12 | 10 | 12 | 19 | | 4957 |
| VIP | QVDRMRINTW | 12 | 10 | 10 | 16 | | 4958 |
| VIP | QVDRMRIRTW | 12 | 10 | 31 | 48 | | 4959 |
| VIP | RMKIRTWNSL | 15 | 10 | 12 | 19 | | 4960 |
| VIP | RMRIRTWKSL | 15 | 10 | 15 | 23 | | 4961 |
| VIP | RMRIRTWNSL | 15 | 10 | 15 | 23 | | 4962 |
| VIP | TWKSLVKIIII | 20 | 10 | 16 | 25 | | 4963 |
| VIP | TWNSLVKIIII | 20 | 10 | 25 | 39 | | 4964 |
| VIP | KISSEVHIPL | 50 | 10 | 14 | 22 | | 4965 |
| VIP | KVSSEVHIPL | 50 | 10 | 19 | 30 | | 4966 |
| VIP | RISSEVIIIPL | 50 | 10 | 13 | 20 | | 4967 |
| VIP | RLVITTYWGL | 65 | 10 | 12 | 19 | | 4968 |
| VIP | DWHLGIIGVSI | 81 | 10 | 21 | 33 | | 4969 |
| VIP | DWHLGQGVSI | 81 | 10 | 18 | 28 | | 4970 |
| VIP | IILGIIGYSIEW | 83 | 10 | 25 | 39 | | 4971 |
| VIP | IILGQGVSIEW | 83 | 10 | 26 | 41 | | 4972 |
| VIP | RYSIQVDPGL | 98 | 10 | 10 | 16 | | 4973 |
| VIP | QIDPDLADQL | 102 | 10 | 10 | 16 | | 4974 |
| VIP | QVDPGLADQL | 102 | 10 | 14 | 22 | | 4975 |
| VIP | LIIILYYPDCF | 111 | 10 | 16 | 25 | | 4976 |
| VIP | LIIIMIIYPDCF | 111 | 10 | 15 | 23 | | 4977 |
| VIP | YFDCPSESAI | 116 | 10 | 28 | 44 | | 4978 |
| VIP | KVGSLQYLAL | 146 | 10 | 51 | 80 | | 4979 |
| VIP | SLQYLALAAL | 149 | 10 | 12 | 19 | | 4980 |
| VIP | SLQYLALKAL | 149 | 10 | 11 | 17 | | 4981 |
| VIP | SLQYLALTAL | 149 | 10 | 31 | 48 | | 4982 |
| VIP | SVKKLTEDRW | 174 | 10 | 13 | 20 | | 4983 |
| VIP | QVMIVWQVDR | 6 | 11 | 43 | 67 | | 4984 |
| VIP | MIVWQVDRM | 8 | 11 | 43 | 67 | | 4985 |
| VIP | RTWKSLVKIIII | 19 | 11 | 14 | 22 | | 4986 |
| VIP | RIWNSLVKIIII | 19 | 11 | 24 | 38 | | 4987 |
| VIP | TWKSLVKIIII | 20 | 11 | 16 | 25 | | 4988 |
| VIP | TWNSLVKIIII | 20 | 11 | 22 | 34 | | 4989 |
| VIP | EVIIIPLGDARL | 54 | 11 | 13 | 20 | | 4990 |
| VIP | EVIIIPLGEARL | 54 | 11 | 20 | 31 | | 4991 |
| VIP | IIIPLGEARLVI | 56 | 11 | 10 | 16 | | 4992 |
| VIP | YWGLIITGERD | 71 | 11 | 22 | 34 | | 4993 |
| VIP | YWGLQTGERD | 71 | 11 | 12 | 19 | | 4994 |
| VIP | GLIITGERDWH | 73 | 11 | 21 | 33 | | 4995 |
| VIP | GLQTGERDWH | 73 | 11 | 12 | 19 | | 4996 |
| VIP | GVSIEWRLRR | 87 | 11 | 10 | 16 | | 4997 |
| VIP | QIDPDLADQLI | 102 | 11 | 10 | 16 | | 4998 |
| VIP | QVDPGLADQLI | 102 | 11 | 14 | 22 | | 4999 |
| VIP | GLADQLIIIMH | 106 | 11 | 11 | 17 | | 5000 |
| VIP | QLIIILYYPDCF | 110 | 11 | 13 | 20 | | 5001 |
| VIP | QLIIIMHYPDCP | 110 | 11 | 14 | 22 | | 5002 |
| VIP | YYPDCFSESAI | 115 | 11 | 20 | 31 | | 5003 |
| VIP | CFSDSAIRKAI | 119 | 11 | 10 | 16 | | 5004 |
| VIP | CPSESAIRKAI | 119 | 11 | 12 | 19 | | 5005 |
| VIP | CPSESAIRNAI | 119 | 11 | 12 | 19 | | 5006 |
| VIP | SLQYLALTALI | 149 | 11 | 27 | 42 | | 5007 |
| VIP | LIKPKKIKPPL | 158 | 11 | 10 | 16 | | 5008 |
| VIP | KTKGIIRGSIIT | 188 | 11 | 15 | 23 | | 5009 |
| VPR | ALELLEEL | 19 | 8 | 10 | 16 | | 5010 |
| VPR | TLELLEEL | 19 | 8 | 44 | 69 | | 5011 |
| VPR | AVRIIFPRI | 30 | 8 | 14 | 22 | | 5012 |
| VPR | WLIIGLGQY | 38 | 8 | 11 | 17 | | 5013 |
| VPR | TWAGVEAI | 53 | 8 | 16 | 25 | | 5014 |
| VPR | TWEGVEAI | 53 | 8 | 20 | 31 | | 5015 |
| VPR | GVEAIIRI | 56 | 8 | 34 | 53 | | 5016 |
| VPR | IIRILQQL | 60 | 8 | 42 | 66 | | 5017 |
| VPR | RILQQLLP | 62 | 8 | 45 | 70 | | 5018 |
| VPR | ILQQLLFI | 63 | 8 | 37 | 58 | | 5019 |
| VPR | LLFIIIFRI | 67 | 8 | 44 | 69 | | 5020 |
| VPR | LLFVIIPRI | 67 | 8 | 12 | 19 | | 5021 |
| VPR | PYNLWILEL | 14 | 9 | 3)1 | 47 | 0.1400 | 5022 |
| VPR | WTLELLEEL | 18 | 9 | 42 | 69 | | 5023 |
| VPR | AVRIIFPRIW | 30 | 9 | 14 | 22 | | 5024 |
| VPR | AVRIIFPRPW | 30 | 9 | 34 | 53 | | 5025 |
| VPR | PWLIIGLGQY | 37 | 9 | 11 | 17 | | 5026 |
| VPR | WLIIGLGQIII | 38 | 9 | 20 | 31 | | 5027 |
| VPR | IYETYGDTW | 46 | 9 | 31 | 48 | 0.0580 | 5028 |
| VPR | IYNTYGDTW | 46 | 9 | 18 | 28 | | 5029 |
| VPR | DTWAGVEAI | 52 | 9 | 16 | 25 | | 5030 |
| VPR | DTWEGVEAI | 52 | 9 | 20 | 31 | | 5031 |
| VPR | TWAGVEAII | 53 | 9 | 16 | 25 | | 5032 |
| VPR | TWEGVEAII | 53 | 9 | 19 | 30 | | 5033 |
| VPR | GVEAIIRIL | 56 | 9 | 34 | 53 | | 5034 |
| VPR | AIIRILQQL | 59 | 9 | 39 | 61 | | 5035 |
| VPR | IIRILQQLL | 60 | 9 | 42 | 66 | | 5036 |
| VPR | RILQQLLFI | 62 | 9 | 36 | 56 | | 5037 |
| VPR | QLLFIIIPRI | 66 | 9 | 44 | 69 | | 5038 |
| VPR | QLLFVIIFRI | 66 | 9 | 10 | 16 | | 5039 |
| VPR | RIGCQIISRI | 74 | 9 | 47 | 73 | | 5040 |
| VPR | RIGCRIISRI | 74 | 9 | 12 | 19 | | 5041 |
| VPR | PYNEFTLELL | 14 | 10 | 30 | 47 | | 5042 |
| VPR | EWTLELLEEL | 17 | 10 | 40 | 63 | | 5043 |
| VPR | ELKNEAVRHP | 25 | 10 | 17 | 27 | | 5044 |
| VPR | ELKSEAVRHF | 25 | 10 | 15 | 23 | | 5045 |
| VPR | AVRIIFPRIWL | 30 | 10 | 14 | 22 | | 5046 |
| VPR | AVRIIFPRPWL | 30 | 10 | 34 | 53 | | 5047 |
| VPR | HFPRIWLHSL | 33 | 10 | 10 | 16 | | 5048 |
| VPR | HFPRPWLHGL | 33 | 10 | 24 | 38 | | 5049 |
| VPR | PWLIIGLGQHI | 37 | 10 | 12 | 19 | | 5050 |
| VPR | WLHGLGQIIIY | 38 | 10 | 20 | 31 | | 5051 |
| VPR | HIYETYCDTW | 45 | 10 | 17 | 27 | | 5052 |
| VPR | HIYNTYGDTW | 45 | 10 | 14 | 22 | | 5053 |
| VPR | YIYETYGDTW | 45 | 10 | 14 | 22 | | 5054 |
| VPR | DTWAGVEAII | 52 | 10 | 16 | 25 | | 5055 |
| VPR | DTWEGVEAII | 52 | 10 | 19 | 30 | | 5056 |
| VPR | AIIRILQQLL | 59 | 10 | 39 | 61 | | 5057 |
| VPR | IIRILQQLLF | 60 | 10 | 41 | 64 | | 5058 |
| VPR | ILQQLLFIIIF | 63 | 10 | 35 | 55 | | 5059 |
| VPR | PWLHCLGQHI | 37 | 11 | 12 | 19 | | 5060 |
| VPR | QYIYETYGDT | 44 | 11 | 14 | 22 | | 5061 |
| VPR | TWAGVEAIIRI | 53 | 11 | 15 | 23 | | 5062 |
| VPR | TWEGVEAIIRI | 53 | 11 | 14 | 22 | | 5063 |
| VPR | AIIRILQQLLF | 59 | 11 | 38 | 59 | | 5064 |
| VPR | IIRILQQLLFI | 60 | 11 | 33 | 52 | | 5065 |
| VPR | RILQQLLFIIIF | 62 | 11 | 34 | 53 | | 5066 |
| VPR | IIFRIGCQIISRI | 71 | 11 | 44 | 69 | | 5067 |
| VPR | HFRIGCRIISRI | 71 | 11 | 11 | 17 | | 5068 |
| VPR | RIGCQIISRIGI | 74 | 11 | 45 | 70 | | 5069 |
| VPR | RIGCRIISRIGI | 74 | 11 | 11 | 17 | | 5070 |
| VPU | KVDYRIVI | 7 | 8 | 01 | 33 | | 5071 |
| VPU | LIIAIVVW | 26 | 8 | 10 | 16 | | 5072 |
| VPU | IVVWTIVF | 30 | 8 | 15 | 23 | | 5073 |
| VPU | VVWTIVFI | 31 | 8 | 15 | 23 | | 5074 |
| VPU | WTIVFIEY | 34 | 8 | 12 | 19 | | 5075 |
| VPU | VFIEYRKI | 37 | 8 | 12 | 19 | | 5076 |
| VPU | KILRQRKI | 45 | 8 | 15 | 23 | | 5077 |
| VPU | EMGIIIIAPW | 89 | 8 | 11 | 17 | | 5078 |
| VPU | NYELAYGAL | 5 | 9 | 01 | 25 | | 5079 |
| VPU | DYKLGVGAL | 10 | 9 | 02 | 29 | | 5080 |
| VPU | DYRLGVGAL | 10 | 9 | 03 | 43 | | 5081 |
| VPU | IIAIVVWTI | 27 | 9 | 23 | 36 | | 5082 |
| VPU | AIVVWTIVF | 29 | 9 | 14 | 22 | | 5083 |
| VPU | IVVWTIVFI | 30 | 9 | 15 | 23 | | 5084 |
| VPU | VWTIVFIEY | 33 | 9 | 12 | 19 | | 5085 |
| VPU | IVFIEYRKI | 36 | 9 | 12 | 19 | | 5086 |
| VPU | KIDRLIDRI | 52 | 9 | 14 | 22 | | 5087 |
| VPU | VTLLSSSKL | 94 | 9 | 01 | 50 | | 5088 |
| VPU | NYELAVGALI | 5 | 10 | 01 | 25 | | 5089 |
| VPU | DYKLGVGALI | 10 | 10 | 02 | 29 | | 5090 |
| VPU | DYRLGVGALI | 10 | 10 | 03 | 43 | | 5091 |
| VPU | AIVVWTIVFI | 29 | 10 | 14 | 22 | | 5092 |
| VPU | VVWTIVFIEY | 31 | 10 | 12 | 19 | | 5093 |
| VPU | ILRQRKIDRL | 46 | 10 | 15 | 23 | | 5094 |
| VPU | GVEMGIIIIAP | 91 | 10 | 01 | 511 | | 5095 |
| VPU | LVTLLSSSKL | 91 | 10 | 01 | 511 | | 5096 |
| VPU | KYDYRIVIVAF | 7 | 11 | 01 | 33 | | 5097 |
| VPU | KVDYRLGVGA | 7 | 11 | 01 | 33 | | 5098 |
| VPU | RIDYRLGVGAL | 7 | 11 | 01 | 33 | | 5099 |
| VPU | IVVWTIVFIEY | 30 | 11 | 12 | 19 | | 5100 |
| VPU | EYRKILRQRKI | 41 | 11 | 13 | 21 | | 5101 |
| VPU | KILRQRKIDRL | 45 | 11 | 15 | 23 | | 5102 |
| VPU | ILRQRKIDRLI | 46 | 11 | 13 | 20 | | 5103 |
| VPU | RIKEIRDDSDY | 64 | 11 | 01 | 50 | | 5104 |
| VPU | RIREIRDDSDY | 64 | 11 | 01 | 50 | | 5105 |

[0391] TABLE XI
HIV B07 Super Motif Peptides with Binding Information

| | | | | | | | |
|---|---|---|---|---|---|---|---|
| | | | No. of | Sequence | Conservancy | | |
| Protein | Sequence | Position | Amino Acids | Frequency | (%) | B*0702 | SEQ ID NO. |

| | | | | | | | |
|---|---|---|---|---|---|---|---|
| ENV | DPNPQEVV | 91 | 8 | 13 | 20 | | 5106 |
| ENV | APAGFAIL | 265 | 8 | 29 | 45 | | 5107 |
| ENV | KPVVSTQL | 299 | 8 | 34 | 53 | | 5108 |
| ENV | RPVVSTQL | 299 | 8 | 26 | 41 | | 5109 |
| ENV | GPCGQTFYA | 362 | 8 | 11 | 17 | | 5110 |
| ENV | LPCRIKQI | 485 | 8 | 31 | 48 | | 5111 |
| ENV | SPLSFQTL | 808 | 8 | 30 | 47 | | 5112 |
| ENV | GPDRPEGI | 822 | 8 | 15 | 23 | | 5113 |
| ENV | EPDRPERI | 823 | 8 | 01 | 33 | | 5114 |
| ENV | PPDRPLGI | 823 | 8 | 01 | 33 | | 5115 |
| ENV | DPNPQEVVL | 91 | 9 | 12 | 19 | 0.0002 | 5116 |
| ENV | KPCVKLTPL | 130 | 9 | 55 | 86 | 0.4100 | 5117 |
| ENV | CPKVSFEPI | 250 | 9 | 30 | 47 | 0.0550 | 5118 |
| ENV | DPIPIIIYCA | 256 | 9 | 12 | 19 | | 5119 |
| ENV | EPIPIIIYCA | 256 | 9 | 26 | 41 | 0.0001 | 5120 |
| ENV | IPIIIYCAPA | 259 | 9 | 36 | 56 | 0.0130 | 5121 |
| ENV | IPIIIYCTPA | 259 | 9 | 18 | 28 | | 5122 |
| ENV | GPCKNVSTV | 283 | 9 | 15 | 23 | | 5123 |
| ENV | GPCTNVSTV | 283 | 9 | 11 | 17 | 0.0019 | 5124 |
| ENV | KPVVSTQLL | 299 | 9 | 34 | 53 | 0.0012 | 5125 |
| ENV | RPVVSTQLL | 299 | 9 | 26 | 41 | 0.0084 | 5126 |
| ENV | DPEIVMIISF | 428 | 9 | 14 | 22 | 0.0001 | 5127 |
| ENV | LPCRIKQII | 485 | 9 | 20 | 31 | 0.0011 | 5128 |
| ENV | LPCRIKQIV | 485 | 9 | 10 | 16 | | 5129 |
| ENV | APTKAKRRV | 575 | 9 | 22 | 34 | 0.0082 | 5130 |
| ENV | SPLSFQTLL | 808 | 9 | 10 | 16 | | 5131 |
| ENV | IPRRIRQGF | 950 | 9 | 10 | 16 | | 5132 |
| ENV | IPRRIRQGL | 950 | 9 | 24 | 38 | | 5133 |
| ENV | IPTRIRQGL | 950 | 9 | 11 | 17 | | 5134 |
| ENV | VPTDPNPQEI | 88 | 10 | 25 | 39 | | 5135 |
| ENV | VPIDPNPQEV | 88 | 10 | 21 | 33 | 0.0008 | 5136 |
| ENV | KPVVSTQLLL | 299 | 10 | 34 | 53 | | 5137 |
| ENV | RPVVSTQLLL | 299 | 10 | 26 | 41 | 0.0038 | 5138 |
| ENV | RPNNNTRKSI | 347 | 0 | 17 | 27 | | 5139 |
| ENV | EPLGVAPTKA | 570 | 10 | 21 | 33 | 0.0005 | 5140 |
| ENV | APTKAKRRVV | 575 | 10 | 22 | 34 | 0.1200 | 5141 |
| ENV | VPVWKEATTT | 53 | 11 | 22 | 34 | 0.0022 | 5142 |
| ENV | VPIDPNPQEV | 88 | 11 | 13 | 20 | | 5143 |
| ENV | KPCVKLTPLC | 130 | 11 | 54 | 84 | 0.0004 | 5144 |
| ENV | CPKVSFEPIPI | 250 | 11 | 30 | 47 | | 5145 |
| ENV | DPIPIHYCAPA | 256 | 11 | 10 | 16 | | 5146 |
| ENV | EPIPIHYCAPA | 256 | 11 | 24 | 38 | | 5147 |
| ENV | EPIPIIIYCTPA | 256 | 11 | 10 | 16 | | 5148 |
| ENV | IPIHYCAPAGF | 239 | 11 | 26 | 41 | | 5149 |
| ENV | IPIHYCTPAGF | 259 | 11 | 10 | 16 | | 5150 |
| ENV | LPCRIKQIINM | 485 | 11 | 18 | 28 | | 5151 |
| ENV | RPGGGDMRDN | 547 | 11 | 38 | 59 | | 5152 |
| GAG | RPGGKKKY | 22 | 8 | 35 | 55 | | 5153 |
| GAG | NTGLLETA | 49 | 8 | 15 | 23 | | 5154 |
| GAG | SPRTLNAW | 169 | 8 | 57 | 89 | 0.0036 | 5155 |
| GAG | SPEVIPMF | 186 | 8 | 55 | 86 | 0.0012 | 5156 |
| GAG | TPQDLNMM | 201 | 8 | 12 | 19 | | 5157 |
| GAG | TPQDLNTM | 201 | 8 | 42 | 66 | 0.0001 | 5158 |
| GAG | HPVIIAGPI | 237 | 8 | 38 | 59 | 0.0012 | 5159 |
| GAG | GPIAPGQM | 242 | 8 | 19 | 30 | 0.0005 | 5160 |
| GAG | GPIPPGQM | 242 | 8 | 17 | 27 | | 5161 |
| GAG | GPVAPGQM | 242 | 8 | 10 | 16 | | 5162 |
| GAG | EPRGSDIA | 251 | 8 | 56 | 88 | 0.0001 | 5163 |
| GAG | PPIPVGDI | 278 | 8 | 10 | 16 | | 5164 |
| GAG | PPIPVGEI | 278 | 8 | 35 | 55 | 0.0001 | 5165 |
| GAG | SPTSILDI | 302 | 8 | 13 | 20 | | 5166 |
| GAG | SPVSILDI | 302 | 8 | 40 | 63 | | 5167 |
| GAG | NPDCKSIL | 351 | 8 | 11 | 17 | | 5168 |
| GAG | NPDCKTIL | 351 | 8 | 46 | 72 | 0.0003 | 5169 |
| GAG | GPGIIKARV | 379 | 8 | 36 | 56 | 0.0002 | 5170 |
| GAG | GPSIIKARV | 379 | 8 | 19 | 30 | | 5171 |
| GAG | APRKKGCW | 440 | 8 | 55 | 86 | 0.0004 | 5172 |
| GAG | PPAESFGF | 498 | 8 | 10 | 16 | | 5173 |
| GAG | PPEESFRF | 498 | 8 | 15 | 23 | | 5174 |
| GAG | PPAESFRF | 510 | 8 | 02 | 67 | | 5175 |
| GAG | PPPESFRF | 510 | 8 | 01 | 33 | | 5176 |
| GAG | EPIDKELY | 533 | 8 | 12 | 19 | | 5177 |
| GAG | EPIDKELY | 537 | 8 | 01 | 25 | | 5178 |
| GAG | SPRTLNAWV | 169 | 9 | 57 | 89 | 0.5500 | 5179 |
| GAG | TPQDLNMML | 201 | 9 | 12 | 19 | | 5180 |
| GAG | TPQDLNTML | 201 | 9 | 42 | 66 | 0.0008 | 5181 |
| GAG | IIPVIIAGPIA | 237 | 9 | 19 | 30 | 0.0590 | 5182 |
| GAG | NPPIPVGDI | 277 | 9 | 10 | 16 | | 5183 |
| GAG | NPPIPVGEI | 277 | 9 | 34 | 54 | 0.0002 | 5184 |
| GAG | PPIPVGDIY | 278 | 9 | 10 | 16 | | 5185 |
| GAG | PPIPVGEIY | 278 | 9 | 35 | 55 | 0.0002 | 5186 |
| GAG | GPKEPFRDY | 312 | 9 | 63 | 98 | 0.0002 | 5187 |
| GAG | GPAATLEEM | 362 | 9 | 16 | 25 | 0.0014 | 5188 |
| GAG | GPGATLEEM | 362 | 9 | 18 | 28 | | 5189 |
| GAG | GPGHKARVL | 379 | 9 | 35 | 55 | 0.0290 | 5190 |
| GAG | GPSHKARVL | 379 | 9 | 19 | 30 | | 5191 |
| GAG | RPEPTAPPA | 490 | 9 | 30 | 47 | 0.0014 | 5192 |
| GAG | APPAESFGF | 497 | 9 | 10 | 16 | | 5193 |
| GAG | APPEESFRF | 497 | 9 | 15 | 23 | 0.0046 | 5194 |
| GAG | RPEPTAPPA | 504 | 9 | 01 | 50 | 0.0014 | 5195 |
| GAG | APPAESFRF | 509 | 9 | 02 | 67 | | 5196 |
| GAG | APPPESFRF | 509 | 9 | 01 | 33 | | 5197 |
| GAG | TPSQKQEPI | 527 | 9 | 10 | 17 | | 5(98 |
| GAG | YPLASLKSL | 545 | 9 | 08 | 17 | | 5199 |
| GAG | YPLASLRSL | 545 | 9 | 07 | 15 | 0.9900 | 5200 |
| GAG | PPLASLKSL | 546 | 9 | 04 | 24 | | 5201 |
| GAG | EPLTALRSL | 547 | 9 | 01 | 33 | | 5202 |
| GAG | PPLASLKSL | 547 | 9 | 01 | 33 | | 5203 |
| GAG | PPLISLKSL | 547 | 9 | 01 | 33 | | 5204 |
| GAG | RPGGKKKYKL | 22 | 10 | 10 | 16 | | 5205 |
| GAG | RPGGKKKYRL | 22 | 10 | 16 | 25 | | 5206 |
| GAG | SPEVIPMFSA | 186 | 10 | 41 | 64 | 0.0002 | 5207 |
| GAG | SPEVIPMFTA | 186 | 10 | 13 | 20 | | 5208 |
| GAG | NPPIPVGDIY | 277 | 10 | 10 | 16 | | 5209 |
| GAG | NPPIPVGEIY | 277 | 10 | 34 | 54 | 0.0002 | 5210 |
| GAG | IPVGDIYKRW | 280 | 10 | 11 | 17 | | 5211 |
| GAG | IPVGEIYKRW | 280 | 10 | 34 | 53 | 0.0002 | 5212 |
| GAG | GPKEPFRDYV | 312 | 10 | 63 | 98 | 0.0002 | 5213 |
| GAG | EPFRDYVDRP | 315 | 10 | 63 | 98 | 0.00012 | 5214 |
| GAG | NPDCKTILKA | 351 | 10 | 28 | 44 | 0.0002 | 5215 |
| GAG | NPDCKTILRA | 351 | 10 | 18 | 28 | | 5216 |
| GAG | GPAATLEEMM | 362 | 10 | 16 | 25 | 0.0020 | 5217 |
| GAG | GPGATLEEMM | 362 | 10 | 18 | 28 | | 5218 |
| GAG | GPGIIKARVLA | 379 | 10 | 35 | 55 | 0.0002 | 5219 |
| GAG | GPSIIKARVLA | 379 | 10 | 19 | 30 | | 5220 |
| GAG | PPAEPTAPPA | 491 | 10 | 01 | 50 | | 5221 |
| GAG | EPTAPPACSF | 494 | 10 | 20 | 31 | | 5222 |
| GAG | EPTAPPEESF | 494 | 10 | 15 | 23 | 0.0002 | 5223 |
| GAG | EPTAPPAESF | 506 | 10 | 01 | 50 | | 5224 |
| GAG | EPIAPPPESF | 506 | 10 | 01 | 50 | | 5225 |
| GAG | PPESFRFEEA | 511 | 10 | 01 | 33 | | 5226 |
| GAG | EPIDKELYPL | 533 | 10 | 12 | 19 | 0.0029 | 5227 |
| GAG | EPIDKELYPL | 537 | 10 | 01 | 25 | 0.0019 | 5228 |
| GAG | YPLASIKSLF | 545 | 10 | 08 | 17 | | 5229 |
| GAG | YPLASLRSLF | 545 | 10 | 07 | 15 | 0.0140 | 5230 |
| GAG | PPLASLKSLP | 546 | 10 | 04 | 24 | | 5231 |
| GAG | EPLTALRSLF | 547 | 10 | 01 | 33 | | 5232 |
| GAG | PPLASLKSLF | 547 | 10 | 01 | 33 | | 5233 |
| GAG | PPLISLKSLF | 547 | 10 | 01 | 33 | | 5234 |
| GAG | QPSLQTGSEEL | 67 | 11 | 13 | 20 | | 5235 |
| GAG | YPIVQNAQGQ | 253 | 11 | 20 | 31 | | 5236 |
| GAG | YPIVQNLQGQ | 153 | 11 | 29 | 45 | | 5237 |
| GAG | SPRTLNAWYK | 169 | 11 | 55 | 86 | 0.0076 | 5238 |
| GAG | SPEVIPMFSAL | 186 | 11 | 41 | 64 | 0.0003 | 5239 |
| GAG | SPEVIPMFTAL | 186 | 11 | 13 | 20 | | 5240) |
| GAG | IPMFSALSIEGA | 190 | 11 | 45 | 70 | 0.0004 | 5241 |
| GAG | IPMFTALSEGA | 290 | 11 | 15 | 23 | | 5242 |
| GAG | TPQDLNMMLN | 201 | 11 | 11 | 17 | | 5243 |
| GAG | IPVGDIYKRWI | 280 | 11 | 10 | 16 | | 5244 |
| GAG | IPVGEIYKRWI | 280 | 11 | 34 | 53 | 0.0001 | 5245 |
| GAG | EPFRDYVDRFF | 325 | 11 | 35 | 55 | | 5246 |
| GAG | EPFREYVIIRF | 325 | 11 | 28 | 44 | 0.0001 | 5247 |
| GAG | NPDCKTILKAL | 352 | 11 | 28 | 44 | 0.0001 | 5248 |
| GAG | NPDCKTILRAL | 352 | 11 | 28 | 28 | | 5249 |
| GAG | WPSHKGRPGN | 474 | 11 | 23 | 36 | | 5250 |
| GAG | WPSNKGRPGN | 474 | 11 | 24 | 22 | | 5251 |
| GAG | WPSSKGRPGN | 474 | 11 | 11 | 17 | | 5252 |
| GAG | PPPESFRFEEA | 520 | 11 | 02 | 33 | | 5253 |
| NEF | APTAAKGV | 34 | 8 | 01 | 33 | | 5254 |
| NEF | VPLRPMTF | 101 | 8 | 20 | 16 | | 5255 |
| NEF | VPLRPMTY | 101 | 8 | 46 | 73 | 0.0001 | 5256 |
| NEF | RPMTYKAA | 104 | 8 | 23 | 36 | | 5257 |
| NEF | RPMTYKGA | 104 | 8 | 25 | 39 | | 5258 |
| NEF | TPGPGIRY | 208 | 8 | 17 | 27 | | 5259 |
| NEF | TPGPGTRF | 208 | 8 | 13 | 20 | | 5260 |
| NEF | GPGIRYPL | 210 | 8 | 17 | 27 | | 5261 |
| NEF | GPGTRFPL | 210 | 8 | 13 | 20 | | 5262 |
| NEF | VPVD)PREV | 230 | 8 | 11 | 17 | | 5263 |
| NEF | IIPICQIIGM | 259 | 8 | 10) | 16 | | 5264 |
| NEF | IIPMSQIIGM | 259 | 8 | 12 | 19 | | 5265 |
| NEF | EPAADGVGA | 40 | 9 | 05 | 19 | 0.0001 | 5266 |
| NEF | PPAAEGVGA | 40 | 9 | 04 | IS | | 5267 |
| NEF | FPVRPQVPL | 94 | 9 | 48 | 75 | 0.7600 | 5268 |
| NEF | RPQVPLRPM | 98 | 9 | 47 | 73 | 1.7000 | 5269 |
| NEF | RPMTYKGAF | 104 | 9 | 12 | 19 | | 5270 |
| NEF | FPLTFGWCF | 217 | 9 | 17 | 27 | | 5271 |
| NEF | YPLTFGWCF | 217 | 9 | 24 | 38 | | 5272 |
| NEF | APTAAKGVGA | 34 | 10 | 01 | 33 | | 5273 |
| NEF | IEPAADGVGAV | 40 | 10 | 04 | 15 | | 5274 |
| NEF | VPLRPMTYKA | 101 | 10 | 20 | 32 | 0.0001 | 5275 |
| NEF | TPGPGIRYPL | 208 | 10 | 16 | 25 | | 5276 |
| NEF | TPGPGTRFPL | 208 | 10 | 13 | 20 | | 5277 |
| NEF | GPGIRYPLTF | 210 | 10 | 13 | 20 | | 5278 |
| NEF | GPGIRFPLTF | 210 | 10 | 13 | 20 | | 5279 |
| NEF | APTAAKGVGA | 34 | 11 | 01 | 33 | | 5280 |
| NEF | RPQVPLRPMT | 98 | 11 | 10 | 16 | | 5281 |
| NEF | RPQVPLRPMT | 98 | 11 | 36 | 56 | | 5282 |
| NEF | VPLRPMTYKA | 101 | 11 | 19 | 30 | | 5283 |
| NEF | VPLRPMTYKG | 101 | 11 | 23 | 37 | | 5284 |
| NEF | RPMTYKGAFD | 104 | 11 | 12 | 19 | | 5285 |
| NEF | FPLTFGWCFK | 217 | 11 | 17 | 27 | | 5286 |
| NEF | YPLTFGWCFK | 217 | 11 | 20 | 31 | | 5287 |
| POL | EPGEDREL | 69 | 8 | 01 | 17 | | 5288 |
| POL | GPERALSV | 70 | 8 | 01 | 20 | | 5289 |
| POL | RPLVTIKI | 95 | 8 | 14 | 22 | | 5290 |
| POL | RPLVTVKI | 95 | 8 | 12 | 19 | | 5291 |
| POL | KPKMIGGI | 130 | 8 | 60 | 94 | 0.0023 | 5292 |
| POL | GPTPVNII | 165 | 8 | 54 | 84 | 0.0001 | 5293 |
| POL | SPIETVPV | 189 | 8 | 56 | 88 | 0.0021 | 5294 |
| POL | WPLTEEKI | 211 | 8 | 56 | 88 | 0.0001 | 5295 |
| POL | NPYNTPIF | 243 | 8 | 24 | 38 | | 5296 |
| POL | NPYNTPVF | 243 | 8 | 38 | 59 | 0.0008 | 5297 |
| POL | TPGIRYQY | 328 | 8 | 52 | 81 | 0.0001 | 5298 |
| POL | PPFLWMGY | 414 | 8 | 64 | 100 | 0.0001 | 5299 |
| POL | EPVIIGVYY | 504 | 8 | 41 | 64 | 0.0001 | 5S300 |
| POL | DPSKDLIA | 512 | 8 | 34 | 53 | | 5301 |
| POL | TPKFKLPI | S78 | 8 | 17 | 27 | | 5302 |
| POL | TPKFRLPI | 578 | 8 | 30 | 47 | | 5303 |
| POL | LPIQKETW | 583 | 8 | 47 | 73 | 0.0001 | 5304 |
| POL | TPPLVKLW | 611 | 8 | 57 | 89 | 0.0001 | 5305 |
| POL | PPLVKLWY | 612 | 8 | 57 | 89 | 0.0001 | 5306 |
| POL | PPIVAKEI | 781 | 8 | 27 | 42 | | 5307 |
| POL | PPVVAKEI | 781 | 8 | 29 | 45 | 0.0001 | 5308 |
| POL | NPQSQGVV | 896 | 8 | 59 | 92 | 0.0001 | 5309 |
| POL | DPIWKGPA | 984 | 8 | 37 | 58 | | 5310 |
| POL | DPLWKGPA | 984 | 8 | 15 | 23 | | 5311 |
| POL | VPRRKAKI | 1013 | 8 | 51 | 80 | 0.0018 | 5312 |
| POL | VPRRKVKI | 1013 | 8 | 11 | 17 | | 5313 |
| POL | FPQGEAREF | 8 | 9 | 10 | 16 | | 5314 |
| POL | SPTRRELQV | 29 | 9 | 14 | 22 | 0.0210 | 5315 |
| POL | SPTSRELQV | 35 | 9 | 01 | 33 | | 5316 |
| POL | SPSSRELQV | 38 | 9 | 01 | 50 | | 5317 |
| POL | VPTNFPQI | 79 | 9 | 01 | 17 | | 5318 |
| POL | LPGKWKPKM | 125 | 9 | 39 | 61 | | 5319 |
| POL | LPGRWKPKM | 125 | 9 | 16 | 25 | 0.0038 | 5320 |
| POL | FPISPIETV | 186 | 9 | 56 | 88 | 0.0016 | 5321 |
| POL | VPVKLKPGM | 194 | 9 | 56 | 88 | 0.0003 | 5322 |
| POL | KPGMDGPKV | 199 | 9 | 51 | 80 | 0.0002 | 5323 |
| POL | GPKVKQWPL | 205 | 9 | 51 | 80 | 0.0150 | 5324 |
| POL | NPYNTPIFA | 243 | 9 | 24 | 38 | | 5325 |
| POL | NPYNTPVFA | 243 | 9 | 37 | 58 | 0.0002 | 5326 |
| POL | SPAIFQSSM | 345 | 9 | 42 | 66 | 0.4100 | 5327 |
| POL | NPDIVIYQY | 364 | 9 | 17 | 27 | 0.0001 | 5328 |
| POL | NPEIVIYQY | 364 | 9 | 23 | 36 | | 5329 |
| POL | EPPFLWMGY | 413 | 9 | 63 | 98 | 0.0001 | 5330 |
| POL | LPEKDSWTV | 435 | 9 | 40 | 63 | 0.0001 | 5331 |
| POL | YPGIKVKQL | 460 | 9 | 11 | 17 | | 5332 |
| POL | YPGIKVRQL | 460 | 9 | 15 | 23 | | 5333 |
| POL | IPLTEEAEL | 482 | 9 | 11 | 17 | | 5334 |
| POL | VPLTEEAEL | 482 | 9 | 19 | 30 | | 5335 |
| POL | TPPLVKLWY | 611 | 9 | 57 | 89 | 0.0001 | 5336 |
| POL | EPIVGAEIP | 624 | 9 | 21 | 33 | 0.0001 | 5337 |
| POL | QPDKSESEL | 701 | 9 | 37 | 58 | 0.0006 | 5338 |
| POL | LPPIVAKEI | 780 | 9 | 27 | 42 | | 5339 |
| POL | LPPVVAKEI | 780 | 9 | 28 | 44 | 0.0006 | 5340 |
| POL | PPIVAKEIV | 781 | 9 | 26 | 41 | | 5341 |
| POL | PPVVAKEIV | 781 | 9 | 28 | 44 | 0.0001 | 5342 |
| POL | VPRRKAKII | 1013 | 9 | 50 | 78 | 0.4800 | 5343 |
| POL | VPRRKVKII | 1013 | 9 | 11 | 17 | | 5344 |
| POL | SPTRKELQVW | 29 | 10 | 13 | 20 | 0.0025 | 5345 |
| POL | EPGEDRELSV | 69 | 10 | 01 | 17 | | 5346 |
| POL | GPERALSVCL | 70 | 10 | 01 | 20 | | 5347 |
| POL | LPGKWKPKMI | 125 | 10 | 39 | 61 | | 5348 |
| POL | LPGRWKPKMI | 125 | 10 | 15 | 23 | 0.0002 | 5349 |
| POL | TPVNIIGRNL | 167 | 10 | 26 | 41 | 0.0003 | 5350 |
| POL | TPVNIIGRNM | 167 | 10 | 24 | 30 | | 5351 |
| POL | SPIETVPVKL | 189 | 10 | 53 | 83 | 0.0028 | 5352 |
| POL | WPLTEEKIKA | 211 | 10 | 54 | 84 | 0.0018 | 5353 |
| POL | GPENPYNTPI | 240 | 10 | 24 | 38 | | 5354 |
| POL | GPENPYNTPV | 240 | 10 | 38 | 59 | 0.0002 | 5355 |
| POL | NPYNTPIFAI | 243 | 10 | 24 | 38 | | 5356 |
| POL | NPYNTPVFAI | 243 | 10 | 37 | 58 | 0.0034 | 5357 |
| POL | VPLDKDFRKY | 307 | 10 | 18 | 28 | 0.0002 | 5358 |
| POL | TPGIRYQYNV | 328 | 10 | 51 | 80 | 0.0004 | 5359 |
| POL | LPQGWKGSPA | 338 | 10 | 58 | 92 | 0.0120 | 5360 |
| POL | EPFRKQNPDI | 358 | 10 | 16 | 25 | 0.0002 | 5361 |
| POL | NPDIVIYQYM | 364 | 10 | 17 | 27 | 0.0005 | 5362 |
| POL | NPEIVIYQYM | 364 | 10 | 23 | 36 | | 5363 |
| POL | PPFLWMGYEL | 414 | 10 | 64 | 100 | 0.0002 | 5364 |
| POL | IIPDKWTVQPI | 424 | 10 | 53 | 83 | 0.0012 | 5365 |
| POL | DPSKDLIAEI | 512 | 10 | 26 | 41 | 0.0002 | 5366 |
| POL | LPIQKETWEA | 583 | 10 | 15 | 23 | | 5367 |
| POL | PPLVKLWYQL | 612 | 10 | 53 | 83 | 0.0002 | 5368 |
| POL | EPIVGAETFY | 624 | 10 | 21 | 33 | 0.0002 | 5369 |
| POL | QPDKSESEIV | 701 | 10 | 37 | 58 | 0.0002 | 5370 |
| POL | LPPIVAKEIV | 780 | 10 | 26 | 41 | | 5371 |
| POL | LPPVVAKEIV | 780 | 10 | 27 | 42 | 0.0002 | 5372 |
| POL | PPIVAKEIVA | 781 | 10 | 25 | 39 | | 5373 |
| POL | PPVVAKEIVA | 781 | 10 | 28 | 44 | 0.0066 | 5374 |
| POL | IPAETGQETA | 841 | 10 | 58 | 91 | 0.0002 | 5375 |
| POL | IPYNPQSQGV | 893 | 10) | 63 | 98 | 0.0023 | 5376 |
| POL | DPIWKGPAKL | 984 | 10 | 35 | 55 | | 5377 |
| POL | DPLWKGPAKL | 984 | 10 | 15 | 23 | 0.0001 | 5378 |
| POL | VPTFNFPQITL | 79 | 11 | 01 | 17 | | 5379 |
| POL | FPQITLWQRPL | 87 | 11 | 40 | 63 | | 5380 |
| POL | KPKMIGGIGGF | 130 | 11 | 60 | 94 | 0.0004 | 5381 |
| POL | TPVNIIGRNLL | 167 | 11 | 26 | 41 | 0.0002 | 5382 |
| POL | TPVNIIGRNML | 167 | 11 | 24 | 38 | | 5383 |
| POL | FPISPIETVPV | 186 | 11 | 55 | 86 | 0.0067 | 5384 |
| POL | WPLTEEKIKAL | 211 | 11 | 54 | 84 | 0.0001 | 5385 |
| POL | GPENPYNTPIF | 240 | 11 | 24 | 38 | | 5386 |
| POL | GPENPYNTPVF | 240 | 11 | 38 | 59 | 0.0001 | 5387 |
| POL | HPAGLKKKKS | 285 | 11 | 50 | 78 | 0.0001 | 5388 |
| POL | IPSINNETPGI | 321 | 11 | 31 | 48 | | 5389 |
| POL | IPSTNNETPGI | 321 | 11 | 11 | 17 | | 5390 |
| POL | TPGIRYQYNVL | 328 | 11 | 51 | 80 | 0.0015 | 5391 |
| POL | LPQGWKGSPAI | 338 | 11 | 58 | 92 | 0.0002 | 5392 |
| POL | EPFRKQNPDIV | 358 | 11 | 14 | 22 | | 5393 |
| POL | EPPFLWMGYE | 413 | 11 | 63 | 98 | 0.0001 | 5394 |
| POL | IIPDKWTVQPI | 424 | 11 | 12 | 19 | | 5395 |
| POL | QPIQLPEKDSW | 431 | 11 | 13 | 20 | | 5396 |
| POL | QPIVLPEKDSW | 431 | 11 | 13 | 20 | | 5397 |
| POL | IPLTEEAELEL | 482 | 11 | 11 | 17 | | 5398 |
| POL | VPLTEEAELEL | 482 | 11 | 19 | 30 | | 5399 |
| POL | EPFKNLKTGK | 536 | 11 | 45 | 70 | 0.0001 | 5400 |
| POL | LPIQKETWEA | 583 | 11 | 15 | 23 | | 5401 |
| POL | LPIQKETWET | 583 | 11 | 27 | 42 | | 5402 |
| POL | TPPLVKLWYQ | 611 | 11 | 53 | 83 | 0.0001 | 5403 |
| POL | EPIVGAETFYV | 624 | 11 | 21 | 33 | | 5404 |
| POL | LPPIVAKEIVA | 780 | 11 | 25 | 39 | | 5405 |
| POL | LPPVVAKEIVA | 780 | 11 | 27 | 42 | 0.0001 | 5406 |
| POL | IPAETGQETAY | 841 | 11 | 58 | 91 | 0.0001 | 5407 |
| POL | IPYNPQSQGVV | 893 | 11 | 59 | 92 | 0.0120 | 5408 |
| POL | NPQSQGVVES | 896 | 11 | 53 | 83 | 0.0001 | 5409 |
| POL | DPIWKGPAKLL | 984 | 11 | 34 | 53 | | 5410 |
| POL | DPLWKGPAKL | 984 | 11 | 14 | 22 | | 5411 |
| REV | SPEGTRQA | 33 | 8 | 13 | 20 | | 5412 |
| REV | RPAEPVPL | 70 | 8 | 20 | 31 | | 5413 |
| REV | VPLQLPPI | 75 | 8 | 11 | 17 | | 5414 |
| REV | VPLQLPPL | 75 | 8 | 36 | 56 | 0.0490 | 5415 |
| REV | PPLERLTL | 80 | 8 | 19 | 30 | 0.0001 | 5416 |
| REV | LPPLERLTL | 79 | 9 | 19 | 30 | 0.3100 | 5417 |
| REV | QPQGTETGV | 100 | 9 | 05 | 18 | | 5418 |
| REV | PPSPEGTRQA | 30 | 10 | 12 | 19 | | 5419 |
| REV | RPAEPVPLQL | 70 | 10 | 20 | 31 | | 5420 |
| REV | EPVPLQLPPI | 73 | 10 | 11 | 17 | | 5421 |
| REV | EPVPLQLPPL | 73 | 10 | 34 | 53 | 0.0023 | 5422 |
| REV | TPPSPEGTRQA | 29 | 11 | 12 | 19 | | 5423 |
| REV | VPLQLPPIERL | 75 | 11 | 11 | 17 | | 5424 |
| REV | VPLQLPPLERL | 75 | 11 | 34 | 53 | 0.0001 | 5425 |
| TAT | IIPGSQPKTA | 16 | 9 | 26 | 41 | 0.0007 | 5426 |
| TAT | IIPGSQPRTA | 16 | 9 | 10 | 16 | | 5427 |
| TAT | GPKESKKKV | 90 | 9 | 13 | 20 | | 5428 |
| TAT | EPVDPNLEPW | 2 | 10 | 14 | 22 | | 5429 |
| TAT | EPVDPRLEPW | 2 | 10 | 13 | 20 | 0.0001 | 5430 |
| VIF | IIPKISSEV | 48 | 8 | 13 | 20 | | 5431 |
| VIF | IIPKVSSEV | 48 | 8 | 19 | 30 | | 5432 |
| VIF | IIPRISSEV | 48 | 8 | 13 | 20 | | 5433 |
| VIF | IPLGDARL | 57 | 8 | 14 | 22 | | 5434 |
| VIF | IPLGEARL | 57 | 8 | 20 | 31 | | 5435 |
| VIF | DPDLADQL | 104 | 8 | 19 | 30 | | 5436 |
| VIF | DPGLADQL | 104 | 8 | 19 | 30 | | 5437 |
| VIF | SPRCEYQA | 135 | 8 | 21 | 33 | 0.0008 | 5438 |
| VIF | IPLGDARLV | 57 | 9 | 11 | 17 | | 5439 |
| VIF | IPLGIEARLV | 57 | 9 | 19 | 30 | | 5440 |
| VIF | DPDLADQLI | 104 | 9 | 19 | 30 | 0.0002 | 5441 |
| VIF | DPGLADQLI | 104 | 9 | 19 | 30 | | 5442 |
| VIF | KPKKIKPPL | 160 | 9 | 10 | 16 | | 5443 |
| VIF | PPLPSVKKL | 167 | 9 | 21 | 33 | | 5444 |
| VIF | PPLPSVRKL | 167 | 9 | 14 | 22 | | 5445 |
| VIF | IIPKISSEVHI | 48 | 10 | 13 | 20 | | 5446 |
| VIF | IIPKVSSEVHI | 48 | 10 | 19 | 30 | | 5447 |
| VIF | IIPRISSEVHI | 48 | 10 | 13 | 20 | 0.0330 | 5448 |
| VIF | IPLGEARLVI | 57 | 10 | 10 | 16 | | 5449 |
| VIF | KPPLPSVKKL | 166 | 10 | 20 | 31 | | 5450 |
| VIF | DPDLADQLIIIL | 104 | 11 | 18 | 28 | | 5451 |
| VPR | EPYNEWTL | 13 | 8 | 30 | 47 | | 5452 |
| VPR | FPRIWLHSL | 34 | 9 | 10 | 16 | | 5453 |
| VPR | PPRPWLIIGL | 34 | 9 | 24 | 38 | | 5454 |
| VPR | GPQREPYNEW | 9 | 10 | 37 | 58 | 0.0001 | 5455 |
| VPR | EPYNEWTLEL | 13 | 10 | 29 | 45 | 00054 | 5456 |
| VPR | RPWLIIGLGQY | 36 | 10 | 10 | 16 | | 5457 |
| VPR | EPYNEWTLEL | 13 | 11 | 29 | 45 | | 5458 |
| VPR | RPWLHGLGQII | 36 | 11 | 12 | 19 | | 5459 |
| VPU | APWDVDDL | 99 | 8 | 12 | 19 | | 5460 |

[0392] TABLE XII
HIV B27 Super Motif Peptides

| | | | | | | |
|---|---|---|---|---|---|---|
| | | | No. of | Sequence | Conservancy | |
| Protein | Sequence | Position | Amino Acids | Frequency | (%) | SEQ ID NO. |

| | | | | | | |
|---|---|---|---|---|---|---|
| ENV | KKLWTLYL | 9 | 8 | 01 | 50 | 5461 |
| ENV | RKSWSLYI | 9 | 8 | 01 | 50 | 5462 |
| ENV | WRWGTLFL | 15 | 8 | 01 | 50 | 5463 |
| ENV | WRWGTMLL | 15 | 8 | 01 | 50 | 5464 |
| ENV | EKLWVTVY | 43 | 8 | 09 | 15 | 5465 |
| ENV | WKEATTTL | 56 | 8 | 23 | 36 | 5466 |
| ENV | MIIEDIISL | 117 | 8 | 29 | 45 | 5467 |
| ENV | IKNCSFNI | 182 | 8 | 13 | 20 | 5468 |
| ENV | PKVSFEPI | 251 | 8 | 30 | 47 | 5469 |
| ENV | LKCNDKKF | 272 | 8 | 13 | 20 | 5470 |
| ENV | AKTIIVQL | 330 | 8 | 14 | 22 | 5471 |
| ENV | QRGPGRAF | 360 | 8 | 01 | 33 | 5472 |
| ENV | KKKKTCIYI | 374 | 8 | 01 | 50 | 5473 |
| ENV | IRQAIICNI | 381 | 8 | 17 | 27 | 5474 |
| ENV | IKQIINMW | 489 | 8 | 33 | 52 | 5475 |
| ENV | IKQIVNMW | 489 | 8 | 13 | 21 | 5476 |
| ENV | QRVGQAMY | 497 | 8 | 11 | 17 | 5477 |
| ENV | FRPGGGDM | 546 | 8 | 43 | 67 | 5478 |
| ENV | WRSELYKY | 557 | 8 | 54 | 84 | 5479 |
| ENV | YKYKVVEI | 562 | 8 | 13 | 20 | 5480 |
| ENV | YKYKVVKI | 562 | 8 | 29 | 45 | 5481 |
| ENV | AIlQLLSGI | 627 | 8 | 38 | 59 | 5482 |
| ENV | VRQLLSGI | 627 | 8 | 10 | 16 | 5483 |
| ENV | LKLTVWGI | 652 | 8 | 13 | 20 | 5484 |
| ENV | EKNIQDLL | 749 | 8 | 17 | 27 | 5485 |
| ENV | EKNEQELL | 749 | 8 | 18 | 28 | 5486 |
| ENV | LRIIFAVL | 790 | 8 | 17 | 27 | 5487 |
| ENV | LRIVFAVL | 790 | 8 | 28 | 44 | 5488 |
| ENV | VRQGYSPL | 803 | 8 | 56 | 88 | 5489 |
| ENV | IRLVNGFL | 843 | 8 | 11 | 17 | 5490 |
| ENV | IRLVSGFL | 843 | 8 | 13 | 20 | 5491 |
| ENV | YHRLRDFI | 865 | 8 | 13 | 20 | 5492 |
| ENV | YIIRLRDLL | 865 | 8 | 15 | 23 | 5493 |
| ENV | IIRLRDFIL | 866 | 8 | 13 | 20 | 5494 |
| ENV | IIRLRDLLL | 866 | 8 | 13 | 20 | 5495 |
| ENV | GRRGWEAL | 884 | 8 | 09 | 15 | 5496 |
| ENV | LKGLRLGW | 890 | 8 | 12 | 40 | 5497 |
| ENV | LRGLQRGW | 890 | 8 | 05 | 17 | 5498 |
| ENV | LRLGWEGL | 893 | 8 | 10 | 32 | 5499 |
| ENV | LKYLWNLL | 900 | 8 | 14 | 22 | 5500 |
| ENV | LKYWWNLL | 900 | 8 | 14 | 22 | 5501 |
| ENV | LKNSAINL | 914 | 8 | 10 | 16 | 5502 |
| ENV | LKNSAISL | 914 | 8 | 10 | 16 | 5503 |
| ENV | LKNSAVSL | 914 | 8 | 13 | 20 | 5504 |
| ENV | PRRIRQGF | 951 | 8 | 11 | 17 | 5505 |
| ENV | PRRIRQGL | 951 | 8 | 26 | 41 | 5506 |
| ENV | GKDLWVTVY | 42 | 9 | 01 | 33 | 5507 |
| ENV | EKLWVTVYY | 43 | 9 | 09 | 15 | 5508 |
| ENV | WKEATTTLF | 56 | 9 | 23 | 36 | 5509 |
| ENV | WKNNMVEQM | 109 | 9 | 35 | 55 | 5510 |
| ENV | MIIEDIISLW | 117 | 9 | 29 | 45 | 5511 |
| ENV | GKNEINDTY | 218 | 9 | 01 | 20 | 5512 |
| ENV | IIIYCAPAGF | 261 | 9 | 27 | 42 | 5513 |
| ENV | IIIYCTPAGF | 261 | 9 | 10 | 16 | 5514 |
| ENV | IKPVVSTQL | 298 | 9 | 33 | 52 | 5515 |
| ENV | IRPVVSTQL | 298 | 9 | 26 | 41 | 5516 |
| ENV | CRIKQIINM | 487 | 9 | 30 | 47 | 5517 |
| ENV | CRIKQIVNM | 487 | 9 | 12 | 19 | 5518 |
| ENV | GKAMYAPPI | 501 | 9 | 23 | 36 | 5519 |
| ENV | GRAMYAPPI | 501 | 9 | 12 | 19 | 5520 |
| ENV | MRDNWRSEL | 553 | 9 | 40 | 63 | 5521 |
| ENV | YKVVKIEPL | 564 | 9 | 25 | 39 | 5522 |
| ENV | EREKRAVGI | 590 | 9 | 11 | 17 | 5523 |
| ENV | QIILLKLTVW | 649 | 9 | 13 | 20 | 5524 |
| ENV | QIILLQLTVW | 649 | 9 | 34 | 53 | 5525 |
| ENV | QIIMLQLTVW | 649 | 9 | 10 | 16 | 5526 |
| ENV | IKQLQARVL | 659 | 9 | 40 | 63 | 5527 |
| ENV | ARVLAVERY | 664 | 9 | 33 | 52 | 5528 |
| ENV | ERYLKDQQL | 670 | 9 | 30 | 47 | 5529 |
| ENV | ERYLRDQQL | 670 | 9 | 18 | 28 | 5530 |
| ENV | LKDQQLLGI | 673 | 9 | 27 | 42 | 5531 |
| ENV | LRDQQLLGI | 673 | 9 | 19 | 30 | 5532 |
| ENV | DKWASLWNW | 759 | 9 | 26 | 41 | 5533 |
| ENV | TKWLWYIKI | 771 | 9 | 15 | 23 | 5534 |
| ENV | LRNLCLFSY | 857 | 9 | 16 | 25 | 5535 |
| ENV | LRSLCLFSY | 857 | 9 | 35 | 55 | 5536 |
| ENV | YIIRLRDFIL | 865 | 9 | 13 | 20 | 5537 |
| ENV | YIIRLRDLLL | 865 | 9 | 13 | 20 | 5538 |
| ENV | IIRLRDLLLI | 866 | 9 | 11 | 17 | 5539 |
| ENV | LKNSAVSLL | 914 | 9 | 11 | 17 | 5540 |
| ENV | IRQGLERAL | 954 | 9 | 34 | 53 | 5541 |
| ENV | KKLWTLYLAM | 9 | 10 | 01 | 50 | 5542 |
| ENV | RKSWSLYIAM | 9 | 10 | 01 | 50 | 5543 |
| ENV | WRWGTLFLGM | 15 | 10 | 01 | 50 | 5544 |
| ENV | WRWGTMLLGM | 15 | 10 | 01 | 50 | 5545 |
| ENV | GKDLWVIVYY | 42 | 10 | 01 | 33 | 5546 |
| ENV | LKPCVKLTPL | 129 | 10 | 55 | 86 | 5547 |
| ENV | VKLTPLCVIL | 133 | 10 | 52 | 81 | 5548 |
| ENV | PKVSFEPIPI | 251 | 10 | 30 | 47 | 5549 |
| ENV | IKPVVSTQLL | 298 | 10 | 33 | 52 | 5550 |
| ENV | IRPVVSTQLL | 298 | 10 | 26 | 41 | 5551 |
| ENV | MIISFNCGGEF | 433 | 10 | 13 | 20 | 5552 |
| ENV | THSFNCGGEF | 433 | 10 | 22 | 34 | 5553 |
| ENV | THSFNCRGEF | 433 | 10 | 13 | 20 | 5554 |
| ENV | CRIKQIINMW | 487 | 10 | 30 | 47 | 5555 |
| ENV | CRIKQIVNMW | 487 | 10 | 12 | 19 | 5556 |
| ENV | IRCSSNITGL | 513 | 10 | 12 | 19 | 5557 |
| ENV | MRDNWRSELY | 553 | 10 | 40 | 63 | 5558 |
| ENV | KRAVGIGAVF | 393 | 10 | 11 | 17 | 5559 |
| ENV | LRAIEAQQIIL | 642 | 10 | 45 | 70 | 5560 |
| ENV | ARVLAVERYL | 664 | 0 | 33 | 52 | 5561 |
| ENV | ERYLKDQQLL | 670 | 10 | 29 | 45 | 5562 |
| ENV | ERYLRDQQLL | 670 | 10 | 17 | 27 | 5563 |
| ENV | LKDQQLLGIW | 673 | 10 | 27 | 42 | 5564 |
| ENV | LRDQQLLGIW | 673 | 10 | 19 | 30 | 5565 |
| ENV | EKNEQDLLAL | 749 | 10 | 17 | 27 | 5566 |
| ENV | EKNEQELLEL | 749 | 10 | 13 | 20 | 5567 |
| ENV | DKWASLWNWF | 759 | 10 | 26 | 41 | 5568 |
| ENV | TKWLWYIKIF | 771 | 10 | 12 | 19 | 5569 |
| ENV | LRIIFAVLSI | 790 | 10 | 14 | 22 | 5570 |
| ENV | LRIVFAVLSI | 790 | 10 | 19 | 30 | 5571 |
| ENV | NRVRQGYSPL | 801 | 10 | 52 | 81 | 5572 |
| ENV | VRQGYSPLSF | 803 | 10 | 48 | 75 | 5573 |
| ENV | PRGPDRPEGI | 820 | 10 | 12 | 19 | 5574 |
| ENV | IRLVSGFLAL | 843 | 10 | 11 | 17 | 5575 |
| ENV | YIIRLRDLLLI | 865 | 10 | 11 | 17 | 5576 |
| ENV | LRLGWEGLKY | 893 | 10 | 09 | 29 | 5577 |
| ENV | LKYWWNLLQY | 900 | 10 | 14 | 22 | 5578 |
| ENV | IRQGLERALL | 954 | 10 | 33 | 52 | 5579 |
| ENV | WRWGTLFLGML | 15 | 11 | 01 | 50 | 5580 |
| ENV | WRWGTMLLGML | 15 | 11 | 01 | 50 | 5581 |
| ENV | YRLINCNTSAI | 235 | 11 | 15 | 24 | 5582 |
| ENV | IIIYCAPAGFAI | 261 | 11 | 27 | 42 | 5583 |
| ENV | IKPVVSTQLLL | 298 | 11 | 33 | 52 | 5584 |
| ENV | IRPVVSTQLLL | 298 | 11 | 26 | 41 | 5585 |
| ENV | TRPNNNTRKSI | 346 | 11 | 12 | 19 | 5586 |
| ENV | QRGPGRAFVTI | 360 | 11 | 01 | 33 | 5587 |
| ENV | MHSFNCGGEFF | 433 | 11 | 13 | 20 | 5588 |
| ENV | THSFNCGGEFF | 433 | 11 | 21 | 33 | 5589 |
| ENV | THSFNCRGEFF | 433 | 11 | 13 | 20 | 5590 |
| ENV | IRCSSNITGLL | 513 | 11 | 10 | 16 | 5591 |
| ENV | YKYKVVKIEPL | 562 | 11 | 25 | 39 | 5592 |
| ENV | EKRAVGIGAVF | 592 | 11 | 10 | 16 | 5593 |
| ENV | KRAVGIGAVFL | 593 | 11 | 11 | 17 | 5594 |
| ENV | LRAIEAQQHLL | 642 | 11 | 44 | 69 | 5595 |
| ENV | QHLLKLTVWGI | 649 | 11 | 13 | 20 | 5596 |
| ENV | QHLLQLTVWGI | 649 | 11 | 34 | 53 | 5597 |
| ENV | LKLTVWGIKQL | 652 | 11 | 13 | 20 | 5598 |
| ENV | GKLICTTAVPW | 686 | 11 | 19 | 30 | 5599 |
| ENV | GKLICTTNVPW | 686 | 11 | 17 | 27 | 5600 |
| ENV | GKLICTTTVPW | 686 | 11 | 12 | 19 | 5601 |
| ENV | TKWLWYIKIFI | 771 | 11 | 12 | 19 | 5602 |
| ENV | IKIFIMIVGGL | 777 | 11 | 38 | 59 | 5603 |
| ENV | LKGLRLGWEGL | 890 | 11 | 08 | 27 | 5604 |
| ENV | LRLGWEGLKYL | 893 | 11 | 09 | 29 | 5605 |
| ENV | LKYWWNLLQYW | 900 | 11 | 14 | 22 | 5606 |
| ENV | LHIPRRIRQGL | 948 | 11 | 12 | 19 | 5607 |
| ENV | RRIRQGLERAL | 952 | 11 | 16 | 25 | 5608 |
| ENV | TRIRQGLERAL | 952 | 11 | 11 | 17 | 5609 |
| GAG | DKWEKIRL | 14 | 8 | 18 | 28 | 5610 |
| GAG | KKYKLKIII | 28 | 8 | 10 | 16 | 5611 |
| GAG | KKYRLKIIL | 28 | 8 | 16 | 25 | 5612 |
| GAG | YKLKIIIVW | 30 | 8 | 13 | 20 | 5613 |
| GAG | YRLKIILVW | 30 | 8 | 17 | 27 | 5614 |
| GAG | CRQILGQL | 59 | 8 | 15 | 23 | 5615 |
| GAG | IKDTKEAL | 96 | 8 | 10 | 16 | 5616 |
| GAG | VKDTKEAL | 96 | 8 | 33 | 52 | 5617 |
| GAG | VRDTKEAL | 96 | 8 | 10 | 16 | 5618 |
| GAG | TKEALDKI | 99 | 8 | 33 | 52 | 5619 |
| GAG | TKEALEKI | 99 | 8 | 10 | 16 | 5620 |
| GAG | GIIQAAMQM | 214 | 8 | 61 | 95 | 5621 |
| GAG | KRWIILGL | 287 | 8 | 55 | 86 | 5622 |
| GAG | PKEPFRDY | 313 | 8 | 63 | 98 | 5623 |
| GAG | FRDYVDRF | 317 | 8 | 64 | 100 | 5624 |
| GAG | CKTILKAL | 354 | 8 | 28 | 44 | 5625 |
| GAG | CKTILIIAL | 354 | 8 | 18 | 28 | 5626 |
| GAG | ARVLAEAM | 384 | 8 | 57 | 89 | 5627 |
| GAG | IIKGRPGNF | 477 | 8 | 23 | 37 | 5628 |
| GAG | NKGRPGNF | 477 | 8 | 14 | 23 | 5629 |
| GAG | SKGRPGNF | 477 | 8 | 11 | 18 | 5630 |
| GAG | LKDKEPPL | 535 | 8 | 01 | 25 | 5631 |
| GAG | ERTENSLY | 537 | 8 | 01 | 25 | 5632 |
| GAG | EKEEKGLY | 538 | 8 | 01 | 25 | 5633 |
| GAG | GKLDAWEKI | 11 | 9 | 17 | 27 | 5634 |
| GAG | LRPGGKKKY | 21 | 9 | 35 | 55 | 5635 |
| GAG | KKKYRLKHL | 27 | 9 | 13 | 20 | 5636 |
| GAG | SRELERFAL | 39 | 9 | 22 | 34 | 5637 |
| GAG | ERFALNPGL | 44 | 9 | 15 | 23 | 5638 |
| GAG | ERFAVNPGL | 44 | 9 | 15 | 23 | 5639 |
| GAG | VKVIEEKAF | 177 | 9 | 24 | 38 | 5640 |
| GAG | VKVVEEKAF | 177 | 9 | 28 | 44 | 5641 |
| GAG | EKAFSPEVI | 182 | 9 | 48 | 75 | 5642 |
| GAG | GIIQAAMQML | 214 | 9 | 61 | 95 | 5643 |
| GAG | LIIPVHAGPI | 236 | 9 | 22 | 34 | 5644 |
| GAG | VIIPVIIAGPI | 236 | 9 | 14 | 22 | 5645 |
| GAG | MREPRGSDI | 249 | 9 | 44 | 69 | 5646 |
| GAG | YKRWIILGL | 286 | 9 | 55 | 86 | 5647 |
| GAG | VRMYSPTSI | 298 | 9 | 14 | 22 | 5648 |
| GAG | VRMYSPVSI | 298 | 9 | 40 | 63 | 5649 |
| GAG | IKQGPKEPF | 309 | 9 | 20 | 31 | 5650 |
| GAG | IRQGPKEPF | 309 | 9 | 42 | 66 | 5651 |
| GAG | FRDYVDRFF | 317 | 9 | 35 | 55 | 5652 |
| GAG | FRDYVDRFY | 317 | 9 | 29 | 45 | 5653 |
| GAG | VKNWMTDTL | 337 | 9 | 16 | 25 | 5654 |
| GAG | VKNWMTETL | 337 | 9 | 36 | 56 | 5655 |
| GAG | SHKGRPGNF | 476 | 9 | 23 | 37 | 5656 |
| GAG | HKGRPGNFL | 477 | 9 | 23 | 37 | 5657 |
| GAG | NKGRPGNFL | 477 | 9 | 09 | 15 | 5658 |
| GAG | RKEPTAPPL | 492 | 9 | 01 | 50 | 5659 |
| GAG | DKDKELYPL | 536 | 9 | 01 | 25 | 5660 |
| GAG | GKKKYRLKIIL | 25 | 10 | 12 | 19 | 5661 |
| GAG | KKYKLKIIIVW | 28 | 10 | 10 | 16 | 5662 |
| GAG | KKYRLKIILVW | 28 | 10 | 16 | 25 | 5663 |
| GAG | KIIIYWASREL | 33 | 10 | 21 | 33 | 5664 |
| GAG | KIILVWASREL | 33 | 10 | 36 | 56 | 5665 |
| GAG | ERFALNPGLL | 44 | 10 | 15 | 23 | 5666 |
| GAG | ERFAVNPGLL | 44 | 10 | 15 | 23 | 5667 |
| GAG | VIIQAISPRTL | 164 | 10 | 27 | 42 | 5668 |
| GAG | VIIQALSPRTL | 164 | 10 | 11 | 17 | 5669 |
| GAG | VRMYSPTSIL | 298 | 10 | 14 | 22 | 5670 |
| GAG | VRMYSPVSIL | 298 | 10 | 40 | 63 | 5671 |
| GAG | VKNWMTDTLL | 337 | 10 | 16 | 25 | 5672 |
| GAG | VKNWMTETLL | 337 | 10 | 36 | 56 | 5673 |
| GAG | LKALGPAAIL | 358 | 10 | 16 | 25 | 5674 |
| GAG | IIKARVLAEAM | 382 | 10 | 57 | 89 | 5675 |
| GAG | CRAPRKKGCW | 438 | 10 | 53 | 83 | 5676 |
| GAG | WKCGKEGIIQM | 447 | 10 | 46 | 72 | 5677 |
| GAG | ERQANFLGKI | 464 | 10 | 54 | 84 | 5678 |
| GAG | SIIKGRPGNFL | 476 | 10 | 23 | 37 | 5679 |
| GAG | TRKEPTAPPL | 491 | 10 | 01 | 50 | 5680 |
| GAG | QKQEPIDKEL | 530 | 10 | 12 | 19 | 5681 |
| GAG | EKEEKGLYPL | 538 | 10 | 01 | 25 | 5682 |
| GAG | DKELYPLASL | 541 | 10 | 13 | 21 | 5683 |
| GAG | DKELYPLTSL | 541 | 10 | 10 | 16 | 5684 |
| GAG | LKSLFGNDPL | 552 | 10 | 12 | 19 | 5685 |
| GAG | ARASVLSGGEL | 3 | 11 | 11 | 17 | 5686 |
| GAG | ARASVLSGGKL | 3 | 11 | 28 | 44 | 5687 |
| GAG | GKLDAWEKIRL | 11 | 11 | 16 | 25 | 5688 |
| GAG | IRLRPGGKKKY | 19 | 11 | 33 | 52 | 5689 |
| GAG | LRPGGKKKYKL | 21 | 11 | 10 | 16 | 5690 |
| GAG | LRPGGKKKYRL | 21 | 11 | 16 | 25 | 5691 |
| GAG | KKKYRLKHLVW | 27 | 11 | 13 | 20 | 5692 |
| GAG | LKHIVWASREL | 32 | 11 | 21 | 33 | 5693 |
| GAG | LKHLVWASREL | 32 | 11 | 22 | 34 | 5694 |
| GAG | LRSLYNTVATL | 77 | 11 | 13 | 20 | 5695 |
| GAG | VKDTKEALDKI | 96 | 11 | 16 | 25 | 5696 |
| GAG | PRTLNAWVKVI | 170 | 11 | 30 | 48 | 5697 |
| GAG | EKAFSPEVIFM | 182 | 11 | 48 | 75 | 5698 |
| GAG | DRLHPVIIAGPI | 234 | 11 | 22 | 34 | 5699 |
| GAG | DRVHPVIIAGPl | 234 | 11 | 14 | 22 | 5700 |
| GAG | VIIAGPIAPGQM | 239 | 11 | 17 | 27 | 5701 |
| GAG | VIIAGPIPPGQM | 239 | 11 | 17 | 27 | 5702 |
| GAG | KRWIILGLNKI | 287 | 11 | 55 | 86 | 5703 |
| GAG | GIIKARVLAEAM | 381 | 11 | 35 | 55 | 5704 |
| GAG | SHKARVLAEAM | 381 | 11 | 19 | 30 | 5705 |
| GAG | MKDCTERQANF | 456 | 11 | 50 | 78 | 5706 |
| GAG | ERQANFLGKIW | 464 | 11 | 54 | 84 | 5707 |
| GAG | QKQEPIDKELY | 530 | 11 | 12 | 19 | 5708 |
| GAG | LKDKEPPLASL | 535 | 11 | 01 | 25 | 5709 |
| GAG | ERTENSLYPPL | 537 | 11 | 01 | 25 | 5710 |
| NEF | GKWSKSSI | 3 | 8 | 18 | 28 | 5711 |
| NEF | SKSSIVGW | 6 | 8 | 20 | 31 | 5712 |
| NEF | EKGGLDGL | 121 | 8 | 26 | 41 | 5713 |
| NEF | EKGGLEGL | 121 | 8 | 34 | 53 | 5714 |
| NEF | SKKRQEIL | 177 | 8 | 25 | 39 | 5715 |
| NEF | KRQDILDL | 181 | 8 | 18 | 28 | 5716 |
| NEF | KRQEILDL | 181 | 8 | 32 | 50 | 5717 |
| NEF | ARELIIPEF | 322 | 8 | 11 | 17 | 5718 |
| NEF | ARELIIPEY | 322 | 8 | 24 | 38 | 5719 |
| NEF | EKGGLDGLI | 121 | 9 | 23 | 36 | 5720 |
| NEF | EKGGLEGLI | 121 | 9 | 27 | 42 | 5721 |
| NEF | KKRQEILDL | 179 | 9 | 25 | 39 | 5722 |
| NEF | QKRQDILDL | 179 | 9 | 12 | 19 | 5723 |
| NEF | KRQDILDLW | 181 | 9 | 18 | 28 | 5724 |
| NEF | KRQEILDLW | 181 | 9 | 32 | 50 | 5725 |
| NEF | IRYPLTFIW | 214 | 9 | 13 | 20 | 5726 |
| NEF | TRFPLTFGW | 214 | 9 | 12 | 19 | 5727 |
| NEF | LIIPICQIIGM | 258 | 9 | 10 | 16 | 5728 |
| NEF | LIIPMSQIIGM | 258 | 9 | 12 | 19 | 5729 |
| NEF | ARELIIPEFY | 322 | 9 | 11 | 17 | 5730 |
| NEF | ARELIIPEYY | 322 | 9 | 21 | 33 | 5731 |
| NEF | SRDLEKIAGAI | 50 | 10 | 14 | 22 | 5732 |
| NEF | VRPQVPLRPM | 97 | 10 | 47 | 73 | 5733 |
| NEF | LRPMTYKGAF | 103 | 10 | 12 | 19 | 5734 |
| NEF | SIIFLKEKGGL | 115 | 10 | 29 | 45 | 5735 |
| NEF | LKEKGGLDGL | 118 | 10 | 26 | 42 | 5736 |
| NEF | LKEKGGLEGL | 118 | 10 | 29 | 47 | 5737 |
| NEF | EKGGLDGLIY | 121 | 10 | 21 | 33 | 5738 |
| NEF | EKGGLEGLIV | 121 | 10 | 19 | 30 | 5739 |
| NEF | SKKRQEILDL | 177 | 10 | 25 | 39 | 5740 |
| NEF | KKRQEILDLW | 179 | 10 | 25 | 39 | 5741 |
| NEF | QKRQDILDLW | 179 | 10 | 12 | 19 | 5742 |
| NEF | YIITQGFFPDW | 193 | 10 | 14 | 22 | 5743 |
| NEF | YIITQGYFPDW | 193 | 10 | 25 | 39 | 5744 |
| NEF | GKWSKSSIVGW | 3 | 11 | 18 | 28 | 5745 |
| NEF | LKEKGGLDGLI | 118 | 11 | 23 | 37 | 5746 |
| NEF | LKEKGGLEGLI | 118 | 11 | 24 | 39 | 5747 |
| NEF | SKKRQEILDLW | 177 | 11 | 25 | 39 | 5748 |
| NEF | KRQDILDLWVY | 181 | 11 | 16 | 25 | 5749 |
| NEF | KRQEILDLWVY | 181 | 11 | 29 | 45 | 5750 |
| NEF | TRFPLTFGWCF | 214 | 11 | 10 | 16 | 5751 |
| POL | TRRELQVW | 43 | 8 | 13 | 20 | 5752 |
| POL | GKWKPKMI | 127 | 8 | 41 | 64 | 5753 |
| POL | GRWKPKMI | 127 | 8 | 16 | 25 | 5754 |
| POL | VRQYDQIL | 143 | 8 | 21 | 33 | 5755 |
| POL | HKAIGTVL | 156 | 8 | 20 | 31 | 5756 |
| POL | KKAIGTVL | 156 | 8 | 29 | 45 | 5757 |
| POL | GRNLLTQI | 173 | 8 | 21 | 33 | 5758 |
| POL | GRNMLTQI | 173 | 8 | 19 | 30 | 5759 |
| POL | GRNMLTQL | 173 | 8 | 11 | 17 | 5760 |
| POL | PKVKQWPL | 206 | 8 | 51 | 80 | 5761 |
| POL | KKKDSTKW | 253 | 8 | 57 | 89 | 5762 |
| POL | NKRTQDFW | 270 | 8 | 57 | 89 | 5763 |
| POL | KKKSVTVL | 291 | 8 | 50 | 78 | 5764 |
| POL | RKYTAFTI | 314 | 8 | 62 | 97 | 5765 |
| POL | IRYQYNVL | 331 | 8 | 53 | 83 | 5766 |
| POL | WKGSPAIF | 342 | 8 | 59 | 92 | 5767 |
| POL | FRKQNPDI | 360 | 8 | 16 | 25 | 5768 |
| POL | IIRAKIEEL | 387 | 8 | 26 | 41 | 5769 |
| POL | IIRTKIEEL | 387 | 8 | 22 | 34 | 5770 |
| POL | LREIILLKW | 394 | 8 | 17 | 27 | 5771 |
| POL | LRQIILLRW | 394 | 8 | 15 | 23 | 5772 |
| POL | EIILLKWGF | 396 | 8 | 4 | 22 | 5773 |
| POL | QIILLRWGF | 396 | 8 | 12 | 19 | 5774 |
| POL | KIIQKEPPF | 409 | 8 | 62 | 97 | 5775 |
| POL | QKEPPFLW | 411 | 8 | 63 | 98 | 5776 |
| POL | DKWTVQPI | 426 | 8 | 54 | 84 | 5777 |
| POL | VKQLCKLL | 465 | 8 | 28 | 44 | 5778 |
| POL | VRQLCKLL | 465 | 8 | 19 | 30 | 5779 |
| POL | TKALITEVI | 475 | 8 | 11 | 17 | 5780 |
| POL | SKDLIAEI | 514 | 8 | 27 | 42 | 5781 |
| POL | QKQGQDQW | 522 | 8 | 16 | 25 | 5782 |
| POL | QKQGQGQW | 522 | 8 | 24 | 38 | 5783 |
| POL | QKIATESI | 565 | 8 | 14 | 22 | 5784 |
| POL | GKTPKFKL | 576 | 8 | 17 | 27 | 5785 |
| POL | GKTPKFRL | 576 | 8 | 30 | 47 | 5786 |
| POL | QKETWEAW | 586 | 8 | 15 | 23 | 5787 |
| POL | QKETWETW | 586 | 8 | 27 | 42 | 5788 |
| POL | TKIGKAGY | 642 | 8 | 10 | 16 | 5789 |
| POL | TKLGKAGY | 642 | 8 | 36 | 56 | 5790 |
| POL | GRQKVVSL | 654 | 8 | 24 | 38 | 5791 |
| POL | QKTELHAI | 667 | 8 | 12 | 19 | 5792 |
| POL | QKTELQAI | 667 | 8 | 42 | 66 | 5793 |
| POL | IKKEKVYL | 718 | 8 | 35 | 55 | 5794 |
| POL | DKLVSAGI | 741 | 8 | 16 | 25 | 5795 |
| POL | DKLVSSGI | 741 | 8 | 29 | 45 | 5796 |
| POL | YHNNWRAM | 767 | 8 | 10 | 16 | 5797 |
| POL | YHSNWRAM | 767 | 8 | 39 | 61 | 5798 |
| POL | WRAMASDF | 771 | 8 | 43 | 67 | 5799 |
| POL | THLEGKII | 818 | 8 | 35 | 55 | 5800 |
| POL | THLEGKVI | 818 | 8 | 26 | 41 | 5801 |
| POL | VIIVASGYI | 829 | 8 | 53 | 83 | 5802 |
| POL | GRWPVKTI | 858 | 8 | 13 | 21 | 5803 |
| POL | GRWPVKVI | 858 | 8 | 22 | 35 | 5804 |
| POL | NKELKKII | 907 | 8 | 57 | 89 | 5805 |
| POL | VRDQAEIIL | 917 | 8 | 48 | 75 | 5806 |
| POL | VREQAEIIL | 917 | 8 | 13 | 20 | 5807 |
| POL | RKGGIGGY | 939 | 8 | 59 | 92 | 5808 |
| POL | TKELQKQI | 962 | 8 | 47 | 75 | 5809 |
| POL | YRDSRDPI | 979 | 8 | 35 | 55 | 5810 |
| POL | YRDSRDPL | 979 | 8 | 14 | 22 | 5811 |
| POL | WKGPAKLL | 987 | 8 | 59 | 92 | 5812 |
| POL | PRRKAKII | 1014 | 8 | 50 | 78 | 5813 |
| POL | PRRKVKII | 1014 | 8 | 11 | 17 | 5814 |
| POL | IKDYGKQM | 1021 | 8 | 11 | 17 | 5815 |
| POL | IRDYGKQM | 1021 | 8 | 50 | 78 | 5816 |
| POL | QRPLVTIKI | 94 | 9 | 14 | 22 | 5817 |
| POL | QRPLVTVKI | 94 | 9 | 12 | 19 | 5818 |
| POL | WKPKMIGGI | 129 | 9 | 60 | 94 | 5819 |
| POL | IKVRQYDQI | 141 | 9 | 41 | 64 | 5820 |
| POL | VRQYDQILI | 143 | 9 | 20 | 31 | 5821 |
| POL | VRQYDQIPI | 143 | 9 | 13 | 20 | 5822 |
| POL | GIIKAIGTVL | 155 | 9 | 20 | 31 | 5823 |
| POL | GKKAIGTVL | 155 | 9 | 29 | 45 | 5824 |
| POL | EKIKALTEI | 216 | 9 | 28 | 44 | 5825 |
| POL | EKIKALVEI | 216 | 9 | 15 | 23 | 5826 |
| POL | EKEGKISKI | 231 | 9 | 36 | 56 | 5827 |
| POL | SKIGPENPY | 237 | 9 | 42 | 66 | 5828 |
| POL | SRIGPENPY | 237 | 9 | 11 | 17 | 5829 |
| POL | IKKKDSTKW | 252 | 9 | 57 | 89 | 5830 |
| POL | TKWRKLVDF | 258 | 9 | 59 | 92 | 5831 |
| POL | RKLVDFREL | 261 | 9 | 63 | 98 | 5832 |
| POL | KKKKSVTVL | 290 | 9 | 50 | 78 | 5833 |
| POL | FRKYTAFTI | 313 | 9 | 61 | 97 | 5834 |
| POL | RKQNPDIVI | 361 | 9 | 14 | 22 | 5835 |
| POL | QIIRAKIEEL | 386 | 9 | 26 | 41 | 5836 |
| POL | QIIRTKIEEL | 386 | 9 | 22 | 34 | 5837 |
| POL | KKIIQKEPPF | 408 | 9 | 60 | 94 | 5838 |
| POL | KIIQKEPPFL | 409 | 9 | 62 | 97 | 5839 |
| POL | QKEPPFLWM | 411 | 9 | 63 | 98 | 5840 |
| POL | QKLVGKLNW | 447 | 9 | 62 | 97 | 5841 |
| POL | GKINWASQI | 451 | 9 | 61 | 95 | 5842 |
| POL | IKVKQICKL | 463 | 9 | 29 | 45 | 5843 |
| POL | IKVRQLCKI | 463 | 9 | 18 | 28 | 5844 |
| POL | LKEPVIIGVY | 502 | 9 | 41 | 64 | 5845 |
| POL | FKNLKTGKY | 538 | 9 | 45 | 70 | 5846 |
| POL | YKNLKTGKY | 538 | 9 | 10 | 16 | 5847 |
| POL | LKTGKYAKM | 541 | 9 | 19 | 30 | 5848 |
| POL | LKTGKYARM | 541 | 9 | 13 | 20 | 5849 |
| POL | AHTNDVKQL | 552 | 9 | 46 | 72 | 5850 |
| POL | QKETWEAWW | 586 | 9 | 15 | 23 | 5851 |
| POL | QKETWETWW | 586 | 9 | 27 | 42 | 5852 |
| POL | QKTEIQAIY | 667 | 9 | 12 | 19 | 5853 |
| POL | KKEKVYIAW | 719 | 9 | 20 | 32 | 5854 |
| POL | KKEKVYISW | 719 | 9 | 13 | 21 | 5855 |
| POL | RKVIFIDGI | 749 | 9 | 50 | 78 | 5856 |
| POL | DHEKYHSNW | 763 | 9 | 10 | 16 | 5857 |
| POL | EHEKYHSNW | 763 | 9 | 20 | 31 | 5858 |
| POL | EHERYHSNW | 763 | 9 | 13 | 20 | 5859 |
| POL | THLEGKIIL | 818 | 9 | 31 | 48 | 5860 |
| POL | THLEGKVIL | 818 | 9 | 23 | 36 | 5861 |
| POL | IHTDNGSNF | 865 | 9 | 42 | 66 | 5862 |
| POL | IKQEFGSPY | 887 | 9 | 26 | 45 | 5863 |
| POL | EHLKTAVQM | 922 | 9 | 57 | 89 | 5864 |
| POL | KRKGGIGGY | 938 | 9 | 59 | 92 | 5865 |
| POL | TKELQKQSI | 962 | 9 | 50 | 56 | 5866 |
| POL | SKSQNFRVY | 970 | 9 | 52 | 59 | 5867 |
| POL | TKIQNFRVY | 970 | 9 | 37 | 58 | 5868 |
| POL | YRDSRDPIW | 979 | 9 | 35 | 55 | 5869 |
| POL | YRDSRDPLW | 979 | 9 | 54 | 22 | 5870 |
| POL | WKGPAKLLW | 987 | 9 | 59 | 92 | 5875 |
| POL | WKGEGAVVS | 995 | 9 | 65 | 95 | 5872 |
| POL | RKAKIIRDY | 1016 | 9 | 45 | 64 | 5873 |
| POL | PKMSGGSGGF | 131 | 10 | 62 | 97 | 5874 |
| POL | SKYRQYDQIL | 141 | 10 | 25 | 33 | 5875 |
| POL | KKDSTKWRKL | 254 | 10 | 58 | 95 | 5876 |
| POL | WRKLVDFREL | 260 | 10 | 63 | 98 | 5877 |
| POL | LKKKKSVIVL | 289 | 10 | 49 | 78 | 5878 |
| POL | DKDFRKYTAF | 350 | 10 | 58 | 28 | 5879 |
| POL | FRKQNPDIVI | 360 | 10 | 14 | 22 | 5880 |
| POL | RKQNPDSVSY | 365 | 10 | 54 | 22 | 5885 |
| POL | AKIEELREIIL | 389 | 10 | 53 | 20 | 5882 |
| POL | TKIEELRQIIL | 389 | 10 | 54 | 22 | 5883 |
| POL | LREIILLKWGF | 394 | 10 | 54 | 22 | 5884 |
| POL | LRQSSLLRWGF | 394 | 10 | 52 | 59 | 5885 |
| POL | DKKISQKEPPF | 407 | 10 | 60 | 94 | 5886 |
| POL | KKHQKEPPFL | 408 | 10 | 60 | 94 | 5887 |
| POL | KHQKEPPFLW | 409 | 10 | 62 | 97 | 5888 |
| POL | DKWTVQPSQL | 426 | 10 | 28 | 44 | 5889 |
| POL | DKWSVQPSVL | 426 | 10 | 52 | 59 | 5890 |
| POL | EKDSWTVNDS | 437 | 10 | 45 | 64 | 5895 |
| POL | GKLNWASQSY | 455 | 10 | 60 | 94 | 5892 |
| POL | SKVKQLCKLL | 463 | 10 | 28 | 44 | 5893 |
| POL | SKVRQLCKLL | 463 | 10 | 58 | 28 | 5894 |
| POL | CKLLRGAKAL | 469 | 10 | 25 | 39 | 5895 |
| POL | CKLLRGTKAL | 469 | 10 | 24 | 38 | 5896 |
| POL | LRGAKALTDI | 472 | 10 | 22 | 34 | 5897 |
| POL | AKALTDIVPL | 475 | 10 | 57 | 27 | 5898 |
| POL | TKALTEVSPL | 475 | 10 | 55 | 57 | 5899 |
| POL | LKEPVHGVYY | 502 | 10 | 39 | 65 | 5900 |
| POL | QKQGQDQWTY | 522 | 10 | 55 | 23 | 5901 |
| POL | QKQGQGQWTY | 522 | 10 | 24 | 38 | 5902 |
| POL | QKIATESIVI | 565 | 10 | 54 | 22 | 5903 |
| POL | GKTPKFKLPI | 576 | 10 | 57 | 27 | 5904 |
| POL | GKTPKFRLPI | 576 | 10 | 29 | 45 | 5905 |
| POL | FKLPIQKETW | 585 | 10 | 20 | 32 | 5906 |
| POL | FRLPIQKETW | 585 | 10 | 26 | 45 | 5907 |
| POL | DRGRQKVVSL | 652 | 10 | 58 | 28 | 5908 |
| POL | QKTELQAIHL | 667 | 10 | 55 | 23 | 5909 |
| POL | QKTELQAIYL | 667 | 10 | 52 | 59 | 5905 |
| POL | IHLALQDSGL | 674 | 10 | 15 | 23 | 5911 |
| POL | IKKEKVYLAW | 718 | 10 | 20 | 31 | 5912 |
| POL | IKKEKVYLSW | 718 | 10 | 13 | 20 | 5913 |
| POL | IRKVLFLDGI | 748 | 10 | 49 | 77 | 5914 |
| POL | DKAQEEHEKY | 758 | 10 | 25 | 39 | 5915 |
| POL | DKAQEEIERY | 758 | 10 | 15 | 23 | 5916 |
| POL | EKYIISNWRAM | 765 | 10 | 28 | 44 | 5917 |
| POL | ERYIISNWRAM | 765 | 10 | 10 | 16 | 5918 |
| POL | WRAMASDFNL | 771 | 10 | 41 | 64 | 5919 |
| POL | DKCQLKGEAM | 793 | 10 | 44 | 69 | 5920 |
| POL | VKAACWWAGI | 878 | 10 | 31 | 48 | 5921 |
| POL | LKTAVQMAVF | 924 | 10 | 57 | 89 | 5922 |
| POL | IIINFKRKGGI | 934 | 10 | 58 | 91 | 5923 |
| POL | FKRKGGIGGY | 937 | 10 | 59 | 92 | 5924 |
| POL | QKQIIKIQNF | 966 | 10 | 12 | 19 | 5925 |
| POL | QKQITKIQNF | 966 | 10 | 34 | 53 | 5926 |
| POL | IKIQNFRVYY | 970 | 10 | 12 | 19 | 5927 |
| POL | TKIQNFRVYY | 970 | 10 | 37 | 58 | 5928 |
| POL | RRKAKIIRDY | 1015 | 10 | 41 | 64 | 5929 |
| POL | TRANSPTRREL | 22 | 11 | 11 | 17 | 5930 |
| POL | ERAIISPATREL | 25 | 11 | 01 | 50 | 5931 |
| POL | SRANSVTSRDL | 25 | 11 | 01 | 50 | 5932 |
| POL | TRANSVSSREL | 34 | 11 | 01 | 33 | 5933 |
| POL | TRANSVTTREL | 36 | 11 | 01 | 33 | 5934 |
| POL | IKIGGQLKEAL | 100 | 11 | 19 | 30 | 5935 |
| POL | GKWKVKMIGGI | 127 | 11 | 41 | 64 | 5936 |
| POL | GRWKVKMIGGI | 127 | 11 | 16 | 25 | 5937 |
| POL | VKMIGGIGGFI | 131 | 11 | 62 | 97 | 5938 |
| POL | IKVRQYDQILI | 141 | 11 | 20 | 31 | 5939 |
| POL | IKVRQYDQIVI | 141 | 11 | 13 | 20 | 5940 |
| POL | VRQYDQILIEI | 143 | 11 | 20 | 31 | 5941 |
| POL | VRQYDQIVIEI | 143 | 11 | 12 | 19 | 5942 |
| POL | VKQWVLTEEKI | 208 | 11 | 52 | 81 | 5943 |
| POL | IKALVEICTEM | 218 | 11 | 15 | 23 | 5944 |
| POL | KKKDSTKWRKL | 253 | 11 | 57 | 89 | 5945 |
| POL | FRELNKRTQDF | 266 | 11 | 57 | 89 | 5946 |
| POL | KRTQDFWEVQL | 271 | 11 | 52 | 81 | 5947 |
| POL | RKYTAFTIPSI | 314 | 11 | 37 | 58 | 5948 |
| POL | FRKQNVDIVIY | 360 | 11 | 14 | 22 | 5949 |
| POL | AKIEELREHLL | 389 | 11 | 13 | 20 | 5950 |
| POL | TKIEELRQIILL | 389 | 11 | 14 | 22 | 5951 |
| POL | DKKIIQKEVVFL | 407 | 11 | 60 | 94 | 5952 |
| POL | KKIIQKEVVFLW | 408 | 11 | 60 | 94 | 5953 |
| POL | KIIQKEVVFLWM | 409 | 11 | 62 | 97 | 5954 |
| POL | QKEVVFLWMGY | 411 | 11 | 63 | 98 | 5955 |
| POL | LHVDKWTVQPI | 423 | 11 | 53 | 83 | 5956 |
| POL | LRGTKALTEVI | 472 | 11 | 11 | 17 | 5957 |
| POL | VKQLTEAVQKI | 557 | 11 | 30 | 47 | 5958 |
| POL | QKIATESIVIW | 565 | 11 | 14 | 22 | 5959 |
| POL | EKEVIVGAETF | 622 | 11 | 16 | 25 | 5960 |
| POL | NRETKLGKAGY | 639 | 11 | 28 | 44 | 5961 |
| POL | DKSESELVNQI | 703 | 11 | 18 | 28 | 5962 |
| POL | DKSESELVSQI | 703 | 11 | 19 | 30 | 5963 |
| POL | MHGQVDCSPGI | 802 | 11 | 52 | 81 | 5964 |
| POL | LKTAVQMAVFI | 924 | 11 | 56 | 88 | 5965 |
| POL | ERIIDIIASDI | 950 | 11 | 12 | 19 | 5966 |
| POL | ERIIDIIATDI | 950 | 11 | 29 | 45 | 5967 |
| POL | ERIVDIIATDI | 950 | 11 | 11 | 17 | 5968 |
| POL | TKELQKQIIKI | 962 | 11 | 10 | 16 | 5969 |
| POL | TKELQKQITKI | 962 | 11 | 31 | 49 | 5970 |
| POL | IKVVPRRKAKI | 1010 | 11 | 51 | 80 | 5971 |
| POL | IKVVPRRKVKI | 1010 | 11 | 11 | 17 | 5972 |
| POL | PRRKAKIIRDY | 1014 | 11 | 41 | 64 | 5973 |
| POL | AKIIRDYGKQM | 1018 | 11 | 42 | 66 | 5974 |
| REV | VRIIKILY | 18 | 8 | 18 | 28 | 5975 |
| REV | RKNRRRRW | 42 | 8 | 21 | 33 | 5976 |
| REV | RRNRRRRW | 42 | 8 | 40 | 63 | 5977 |
| REV | WRARQRQI | 49 | 8 | 36 | 56 | 5978 |
| REV | WRERQRQI | 49 | 8 | 11 | 17 | 5979 |
| REV | ERILSTCL | 61 | 8 | 11 | 17 | 5980 |
| REV | ARKNRRRRW | 41 | 9 | 18 | 28 | 5981 |
| REV | ARRNRRRRW | 41 | 9 | 39 | 61 | 5982 |
| REV | ARQRQIIISI | 51 | 9 | 10 | 16 | 5983 |
| REV | GRPAEPVPL | 69 | 9 | 20 | 31 | 5984 |
| REV | GRSAEPVPL | 69 | 9 | 12 | 19 | 5985 |
| REV | GRSGDSDEEL | 3 | 10 | 17 | 27 | 5986 |
| REV | IKILYQSNPY | 21 | 10 | 25 | 39 | 5987 |
| REV | RRWRARQRQI | 47 | 10 | 34 | 53 | 5988 |
| REV | RRWRERQRQI | 47 | 10 | 11 | 17 | 5989 |
| REV | GRSGDSDEELL | 3 | 11 | 16 | 25 | 5990 |
| REV | RRRWRARQRQI | 46 | 11 | 34 | 53 | 5991 |
| REV | RRRWRERQRQI | 46 | 11 | 11 | 17 | 5992 |
| REV | WRARQRQIIISI | 49 | 11 | 10 | 16 | 5993 |
| REV | GRPAEPVPLQL | 69 | 11 | 20 | 31 | 5994 |
| REV | GRSAEPVPLQL | 69 | 11 | 12 | 19 | 5995 |
| TAT | KKGLGISY | 43 | 8 | 15 | 23 | 5996 |
| TAT | NKGLGISY | 43 | 8 | 14 | 22 | 5997 |
| TAT | TKGLGISY | 43 | 8 | 19 | 30 | 5998 |
| VIF | DRMKIRTW | 14 | 8 | 12 | 19 | 5999 |
| VIF | DRMRINTW | 14 | 8 | 10 | 16 | 6000 |
| VIF | DRMRIRTW | 14 | 8 | 32 | 50 | 6001 |
| VIF | ARLVITTY | 64 | 8 | 11 | 17 | 6002 |
| VIF | LHTGERDW | 74 | 8 | 22 | 34 | 6003 |
| VIF | GHGVSIEW | 85 | 8 | 31 | 48 | 6004 |
| VIF | GHNKVGSL | 143 | 8 | 47 | 73 | 6005 |
| VIF | NKVGSLQY | 145 | 8 | 47 | 73 | 6006 |
| VIF | PKKIKPPL | 161 | 8 | 19 | 30 | 6007 |
| VIF | KKLTEDRW | 176 | 8 | 13 | 21 | 6008 |
| VIF | GHRGSIITM | 191 | 8 | 25 | 39 | 6009 |
| VIF | NRWQVLIVW | 3 | 9 | 10 | 16 | 6010 |
| VIF | NRWQVMIVW | 3 | 9 | 42 | 66 | 6011 |
| VIF | MKIRTWNSL | 16 | 9 | 12 | 19 | 6012 |
| VIF | MKIRTWKSL | 16 | 9 | 15 | 23 | 6013 |
| VIF | MRIRTWNSL | 16 | 9 | 15 | 23 | 6014 |
| VIF | WKSLVKHHM | 21 | 9 | 18 | 28 | 6015 |
| VIF | WKSLVKYHM | 21 | 9 | 10 | 16 | 6016 |
| VIF | PKISSLVIII | 49 | 9 | 15 | 23 | 6017 |
| VIF | PKVSSEVIII | 49 | 9 | 20 | 31 | 6018 |
| VIF | PRISSEVIII | 49 | 9 | 15 | 23 | 6019 |
| VIF | ARLVITTYW | 64 | 9 | 11 | 17 | 6020 |
| VIF | WIILGIIGVSI | 82 | 9 | 23 | 36 | 6021 |
| VIF | WIILGQGVSI | 82 | 9 | 26 | 41 | 6022 |
| VIF | IIILYYFDCP | 112 | 9 | 16 | 25 | 6023 |
| VIF | IIIMIIYFDCP | 112 | 9 | 15 | 23 | 6024 |
| VIF | NKVGSLQYL | 145 | 9 | 47 | 75 | 6025 |
| VIF | VKKLTEDRW | 175 | 9 | 13 | 20 | 6026 |
| VIF | WKSLVKIIIIMY | 21 | 10 | 18 | 28 | 6027 |
| VIF | AKGWFYRIIIIY | 35 | 10 | 10 | 16 | 6028 |
| VIF | VIIIPLGDARL | 55 | 10 | 13 | 20 | 6029 |
| VIF | VIIIPLGEARL | 55 | 10 | 20 | 31 | 6030 |
| VIF | LIITGERDWIIL | 74 | 10 | 21 | 33 | 6031 |
| VIF | GIIGVSIEWRL | 85 | 10 | 15 | 23 | 6032 |
| VIF | GIINKVGSLQY | 143 | 10 | 47 | 73 | 6033 |
| VIF | IKPKKIKPPL | 159 | 10 | 10 | 16 | 6034 |
| VIF | TKGIIRGSHTM | 189 | 10 | 18 | 29 | 6035 |
| VIF | DRMKIRTWNSL | 14 | 11 | 12 | 19 | 6036 |
| VIF | DRMRIRTWKSL | 14 | 11 | 15 | 23 | 6037 |
| VIF | DRMRIRTWNSL | 14 | 11 | 15 | 23 | 6038 |
| VIF | WKSLVKHIIMYI | 21 | 11 | 11 | 17 | 6039 |
| VIF | RIIPKVSSEVHI | 47 | 11 | 16 | 25 | 6040 |
| VIF | PKISSEVIIIPL | 49 | 11 | 14 | 22 | 6041 |
| VIF | PKVSSEVIIIPL | 49 | 11 | 19 | 30 | 6042 |
| VIF | PRISSEVIIIPL | 49 | 11 | 13 | 20 | 6043 |
| VIF | ARLVITTYWGL | 64 | 11 | 11 | 17 | 6044 |
| VIF | WIILGIIGVSIEW | 82 | 11 | 23 | 36 | 6045 |
| VIF | WIILGQGVSIEW | 82 | 11 | 26 | 41 | 6046 |
| VIF | GIINKVGSLQYL | 143 | 11 | 47 | 73 | 6047 |
| VIF | NKVGSLQYLAL | 145 | 11 | 46 | 73 | 6048 |
| VPR | QREPYNEW | 11 | 8 | 38 | 59 | 6049 |
| VPR | VRHPPRIW | 31 | 8 | 14 | 22 | 6050 |
| VPR | VRHPPRPW | 31 | 8 | 34 | 53 | 6051 |
| VPR | RHPPRIWL | 32 | 8 | 14 | 22 | 6052 |
| VPR | RHPPRPWL | 32 | 8 | 34 | 53 | 6053 |
| VPR | PRIWLHSL | 35 | 8 | 10 | 16 | 6054 |
| VPR | PRPWLHGL | 35 | 8 | 24 | 38 | 6055 |
| VPR | LHGLGQHI | 39 | 8 | 20 | 31 | 6056 |
| VPR | IRILQQLL | 61 | 8 | 45 | 70 | 6057 |
| VPR | CRHSRIGI | 77 | 8 | 11 | 17 | 6058 |
| VPR | QHSRIGII | 78 | 8 | 16 | 25 | 6059 |
| VPR | LKNEAVRHF | 26 | 9 | 18 | 28 | 6060 |
| VPR | LKQEAVRHF | 26 | 9 | 11 | 57 | 6065 |
| VPR | LKSEAVRHF | 26 | 9 | 15 | 23 | 6062 |
| VPR | VRIIFPKIWL | 35 | 9 | 14 | 22 | 6063 |
| VPR | VRIIFPRPWL | 35 | 9 | 34 | 53 | 6064 |
| VPR | LIIGLGQIIIY | 39 | 9 | 20 | 31 | 6065 |
| VPR | IRILQQLLF | 65 | 9 | 44 | 69 | 6066 |
| VPR | QREPYNEWTL | 11 | 10 | 30 | 47 | 6067 |
| VPR | IRILQQLLFI | 61 | 10 | 36 | 56 | 6068 |
| VPR | FRIGCQIISRI | 73 | 10 | 44 | 69 | 6069 |
| VPR | FRIGCRIISRI | 73 | 10 | 12 | 19 | 6070 |
| VPR | RIIFPRIWLIISL | 32 | 11 | 10 | 16 | 6071 |
| VPR | RIIFPRPWLIIGL | 32 | 11 | 24 | 38 | 6072 |
| VPR | PRPWLHGLGQY | 35 | 11 | 10 | 16 | 6073 |
| VPR | QIIIYETYGDTW | 44 | 11 | 17 | 27 | 6074 |
| VPR | QIIIYNTYGDTW | 44 | 11 | 13 | 20 | 6075 |
| VPU | QRKIDRLI | 49 | 8 | 21 | 33 | 6076 |
| VPU | AKVDYRIVI | 6 | 9 | 01 | 33 | 6077 |
| VPU | RKILRQRKI | 44 | 9 | 13 | 21 | 6078 |
| VPU | LRQRKIDRL | 47 | 9 | 17 | 27 | 6079 |
| VPU | YRKILRQRKI | 42 | 10 | 13 | 21 | 6080 |
| VPU | #KKLLKQKKI | 43 | 10 | 01 | 50 | 6081 |
| VPU | LRQRKIDRLI | 47 | 10 | 15 | 24 | 6082 |
| VPU | RKIDRLIDRI | 51 | 10 | 12 | 19 | 6083 |
| VPU | QRKIDRLIDRI | 49 | 11 | 12 | 19 | 6084 |

[0393] TABLE XIII
HIV B58 Super Motif Peptides

| | | | | | | |
|---|---|---|---|---|---|---|
| | | | No. of | Sequence | Conservancy | |
| Protein | Sequence | Position | Amino Acids | Frequency | (%) | SEQ ID NO. |

| | | | | | | |
|---|---|---|---|---|---|---|
| ENV | NTSPRSRV | 376 | 8 | 01 | 33 | 6085 |
| ENV | NTSPRSRVAY | 376 | 10 | 01 | 33 | 6086 |
| ENV | TAGNSSRAAY | 376 | 10 | 01 | 33 | 6087 |
| ENV | TSNSSNSSTPI | 160 | 11 | 01 | 33 | 6088 |
| ENV | GTAGNSSRAAY | 375 | 11 | 01 | 33 | 6089 |
| ENV | IITEGNITL | 478 | 8 | 01 | 50 | 6090 |
| ENV | NANITIPCRI | 478 | 10 | 01 | 50 | 6091 |
| ENV | STRTIIREKRAV | 586 | 11 | 01 | 50 | 6092 |
| ENV | DSSNSTGNY | 218 | 9 | 01 | 20 | 6093 |
| ENV | SINGTETF | 537 | 8 | 01 | 17 | 6094 |
| ENV | NTETNKTETF | 537 | 10 | 01 | 17 | 6095 |
| ENV | NTTGNTTETF | 537 | 10 | 01 | 17 | 6096 |
| ENV | GSENGTETF | 538 | 9 | 02 | 18 | 6097 |
| ENV | NTRKSIRI | 351 | 8 | 10 | 16 | 6098 |
| ENV | SSLKGLRL | 886 | 8 | 10 | 16 | 6099 |
| ENV | SSLKGLRLGW | 886 | 10 | 10 | 16 | 6100 |
| ENV | CTPAGFAI | 264 | 8 | 10 | 16 | 6101 |
| ENV | QSSGGDPEI | 423 | 9 | 10 | 16 | 6102 |
| ENV | QSSGGDPEIV | 423 | 10 | 10 | 16 | 6103 |
| ENV | WSQELKNSAV | 910 | 10 | 10 | 16 | 6104 |
| ENV | FAILKCNDKKF | 269 | 11 | 10 | 16 | 6105 |
| ENV | RAVGIGAVF | 594 | 9 | 11 | 17 | 6106 |
| ENV | RAVGIGAVFL | 594 | 10 | 11 | 17 | 6107 |
| ENV | AARTVELL | 876 | 8 | 11 | 17 | 6108 |
| ENV | GTDRVIEV | 932 | 8 | 11 | 17 | 6109 |
| ENV | LALDKWASL | 756 | 9 | 11 | 17 | 6110 |
| ENV | IAARTVELL | 874 | 9 | 11 | 17 | 6111 |
| ENV | VSLLNATAI | 919 | 9 | 11 | 17 | 6112 |
| ENV | YATGDIIGDI | 368 | 10 | 11 | 17 | 6113 |
| ENV | TTNVPWNSSW | 691 | 10 | 11 | 17 | 6114 |
| ENV | LALDKWASLW | 756 | 10 | 11 | 17 | 6115 |
| ENV | ISNWLWYIKI | 770 | 10 | 11 | 17 | 6116 |
| ENV | RSIRLVNGFL | 841 | 10 | 11 | 17 | 6117 |
| ENV | CTTNVPWNSSW | 690 | 11 | 11 | 17 | 6118 |
| ENV | ISNWLWYIKIF | 770 | 11 | 11 | 17 | 6119 |
| ENV | SAVSLLNATAI | 917 | 11 | 11 | 17 | 6120 |
| ENV | VSLLNATAIAV | 919 | 11 | 11 | 17 | 6121 |
| ENV | RAVGIGAV | 594 | 8 | 12 | 19 | 6122 |
| ENV | EAQQIILLKL | 646 | 9 | 12 | 19 | 6123 |
| ENV | EAQQIILLKLTV | 646 | 11 | 12 | 19 | 6124 |
| ENV | RAMYAPPI | 502 | 8 | 12 | 19 | 6125 |
| ENV | GALFLGFL | 601 | 8 | 12 | 19 | 6126 |
| ENV | IAARTVEL | 874 | 8 | 12 | 19 | 6127 |
| ENV | PTRIRQGL | 951 | 8 | 12 | 19 | 6128 |
| ENV | ATGDIIGDI | 369 | 9 | 12 | 19 | 6129 |
| ENV | RSIRLVNGF | 841 | 9 | 12 | 19 | 6130 |
| ENV | MTWMEWEREI | 721 | 10 | 12 | 19 | 6131 |
| ENV | RAILHIPRRI | 945 | 10 | 12 | 19 | 6132 |
| ENV | PTDPNPQEVVL | 89 | 11 | 12 | 19 | 6133 |
| ENV | TSVITQACPKV | 242 | 11 | 12 | 19 | 6134 |
| ENV | GTCPCKNVSTV | 281 | 11 | 12 | 19 | 6135 |
| ENV | TTIISFNCRGEF | 432 | 11 | 12 | 19 | 6136 |
| ENV | CSGKLICTTTV | 684 | 11 | 12 | 19 | 6137 |
| ENV | ITKWLWYIKIF | 770 | 11 | 12 | 19 | 6138 |
| ENV | FSYHRLRDLLL | 863 | 11 | 12 | 19 | 6139 |
| ENV | LAEEEVVI | 312 | 8 | 13 | 20 | 6140 |
| ENV | GAMFLGFL | 601 | 8 | 13 | 20 | 6141 |
| ENV | RSIRLVSGF | 841 | 9 | 13 | 20 | 6142 |
| ENV | PTDPNPQEVV | 89 | 10 | 13 | 20 | 6143 |
| ENV | SAITQACPKV | 243 | 10 | 13 | 20 | 6144 |
| ENV | GSLAEEEVVI | 310 | 10 | 13 | 20 | 6145 |
| ENV | SSGGDPEIVM | 424 | 10 | 13 | 20 | 6146 |
| ENV | RSIRLVSGFL | 841 | 10 | 13 | 20 | 6147 |
| ENV | FSYIIRLRDFI | 863 | 10 | 13 | 20 | 6148 |
| ENV | TSAITQACPKV | 242 | 11 | 13 | 20 | 6149 |
| ENV | FSYIIRLRDFIL | 863 | 11 | 13 | 20 | 6150 |
| ENV | NAKTIIVQL | 329 | 9 | 14 | 22 | 6151 |
| ENV | QAMYAPPI | 502 | 8 | 14 | 22 | 6152 |
| ENV | ISNWLWYI | 770 | 8 | 14 | 22 | 6153 |
| ENV | GSLAEEEVV | 310 | 9 | 14 | 22 | 6154 |
| ENV | ITNWLWYIKI | 770 | 10 | 14 | 22 | 6155 |
| ENV | FSYIIRLRDLL | 863 | 10 | 14 | 22 | 6156 |
| ENV | IAVAEGIDRV | 927 | 10 | 14 | 22 | 6157 |
| ENV | ITNWLWYIKIF | 770 | 11 | 14 | 22 | 6158 |
| ENV | IAVAEGTDRVI | 927 | 11 | 14 | 22 | 6159 |
| ENV | ITKWLWYIKI | 770 | 10 | 15 | 23 | 6160 |
| ENV | ITLPCRIKQII | 483 | 11 | 15 | 23 | 6161 |
| ENV | IAVAEGTDRII | 927 | 11 | 15 | 23 | 6162 |
| ENV | GSLAEEEV | 310 | 8 | 16 | 25 | 6163 |
| ENV | SSGGDLEI | 424 | 8 | 16 | 25 | 6164 |
| ENV | ITKWLWYI | 770 | 8 | 16 | 25 | 6165 |
| ENV | VAEGTDRV | 929 | 8 | 16 | 25 | 6166 |
| ENV | HSFNCRGEF | 434 | 9 | 16 | 25 | 6167 |
| ENV | VSGFLALAW | 846 | 9 | 16 | 25 | 6168 |
| ENV | VAEGTDRVI | 929 | 9 | 16 | 25 | 6169 |
| ENV | IISFNCRGEFF | 434 | 10 | 16 | 25 | 6170 |
| ENV | IAVAEGTDRI | 927 | 10 | 16 | 25 | 6171 |
| ENV | TTHSFNCGGEF | 432 | 11 | 16 | 25 | 6172 |
| ENV | IISFNCRGEFFY | 434 | 11 | 16 | 25 | 6173 |
| ENV | GTCPCKNV | 281 | 8 | 17 | 27 | 6174 |
| ENV | DAKAYDTEV | 70 | 9 | 17 | 27 | 6175 |
| ENV | ASLWNWFDI | 762 | 9 | 17 | 27 | 6176 |
| ENV | KAYDTEVIINV | 72 | 10 | 17 | 27 | 6177 |
| ENV | VAPTKAKRRV | 574 | 10 | 17 | 27 | 6178 |
| ENV | WASLWNWFDI | 761 | 10 | 17 | 27 | 6179 |
| ENV | ASDAKAYDTEV | 68 | 11 | 17 | 27 | 6180 |
| ENV | KAYDTEVIINVW | 72 | 11 | 17 | 27 | 6181 |
| ENV | VAPTKAKRRVV | 574 | 11 | 17 | 27 | 6182 |
| ENV | CSGKLICTTNV | 684 | 11 | 17 | 27 | 6183 |
| ENV | SSGGDPEIV | 424 | 9 | 18 | 28 | 6184 |
| ENV | FSYIIRLRDF | 863 | 9 | 18 | 28 | 6185 |
| ENV | VAEGTDRII | 929 | 9 | 18 | 28 | 6186 |
| ENV | DTEVIINVW | 75 | 8 | 19 | 30 | 6187 |
| ENV | SSNITGLL | 516 | 8 | 19 | 30 | 6188 |
| ENV | ITNWLWYI | 770 | 8 | 19 | 30 | 6189 |
| ENV | VAEGTDRI | 929 | 8 | 19 | 30 | 6190 |
| ENV | CSSNIIGLL | 515 | 9 | 19 | 30 | 6191 |
| ENV | SSNITGLLL | 516 | 9 | 19 | 30 | 6192 |
| ENV | CSSNITGLLL | 515 | 10 | 19 | 30 | 6193 |
| ENV | CSGKLICTTAV | 684 | 11 | 19 | 30 | 6194 |
| ENV | LALAWDDLRSL | 850 | 11 | 19 | 30 | 6195 |
| ENV | LAWDDLRSL | 852 | 9 | 20 | 31 | 6196 |
| ENV | LAWDDLRSLCL | 852 | 11 | 20 | 31 | 6197 |
| ENV | CSSNITGL | 515 | 8 | 21 | 33 | 6198 |
| ENV | PTDPNPQEV | 89 | 9 | 21 | 33 | 6199 |
| ENV | ETFRPGGGDM | 544 | 10 | 21 | 33 | 6200 |
| ENV | PTKAKRRV | 576 | 8 | 22 | 34 | 6201 |
| ENV | GAVFLGFL | 601 | 8 | 22 | 34 | 6202 |
| ENV | PTKAKKRVV | 576 | 9 | 22 | 34 | 6203 |
| ENV | KAMYAPPI | 502 | 8 | 23 | 36 | 6204 |
| ENV | FSYIIRLRDL | 863 | 9 | 23 | 36 | 6205 |
| ENV | SSGGDPEI | 424 | 8 | 24 | 38 | 6206 |
| ENV | LALAWDDL | 850 | 8 | 25 | 39 | 6207 |
| ENV | PTDPNPQEI | 89 | 9 | 25 | 39 | 6208 |
| ENV | ITLPCRIKQI | 483 | 10 | 25 | 39 | 6209 |
| ENV | LSGIVQQQNNL | 631 | 11 | 25 | 39 | 6210 |
| ENV | CTIIGIRPV | 294 | 8 | 26 | 41 | 6211 |
| ENV | QSNLLRAI | 638 | 8 | 26 | 41 | 6212 |
| ENV | CTIIGIRPYV | 294 | 9 | 26 | 41 | 6213 |
| ENV | ITLTVQARQL | 621 | 10 | 27 | 42 | 6214 |
| ENV | ITLTVQARQLL | 621 | 11 | 27 | 42 | 6215 |
| ENV | VSFEPIPIHY | 253 | 10 | 28 | 44 | 6216 |
| ENV | YSPLSFQTL | 807 | 9 | 29 | 46 | 6217 |
| ENV | CAPAGFAI | 264 | 8 | 29 | 45 | 6218 |
| ENV | CAPAGFAIL | 264 | 9 | 29 | 45 | 6219 |
| ENV | ITQACPKVSF | 245 | 10 | 29 | 45 | 6220 |
| ENV | VSFEPIPI | 253 | 8 | 30 | 47 | 6221 |
| ENV | WASLWNWF | 761 | 8 | 30 | 47 | 6222 |
| ENV | QACPKVSFEPI | 248 | 11 | 30 | 47 | 6223 |
| ENV | FAYLSIVNRY | 794 | 10 | 31 | 48 | 6224 |
| ENV | RSLCLFSYIIRL | 858 | 11 | 31 | 48 | 6225 |
| ENV | CTHGIKPVY | 294 | 9 | 32 | 50 | 6226 |
| ENV | LSGIVQQQSNL | 631 | 11 | 32 | 50 | 6227 |
| ENV | CTHGIKPY | 294 | 8 | 33 | 52 | 6228 |
| ENV | QARYLAVERY | 663 | 10 | 33 | 52 | 6229 |
| ENV | QARYLAYERYL | 663 | 11 | 33 | 52 | 6230 |
| ENV | EAQQHLLQLTV | 646 | 11 | 34 | 54 | 6231 |
| ENV | VTENFNMW | 102 | 8 | 34 | 53 | 6232 |
| ENV | AAGSTMGAASI | 611 | 11 | 34 | 53 | 6233 |
| ENV | LSIYNRVRQGY | 797 | 11 | 34 | 53 | 6234 |
| ENV | EAQQIILLQL | 646 | 9 | 35 | 56 | 6235 |
| ENV | RSLCLFSY | 858 | 8 | 35 | 55 | 6236 |
| ENV | IISFNCGGIEFF | 434 | 10 | 35 | 55 | 6237 |
| ENV | IISFNCGGEFFY | 434 | 11 | 35 | 55 | 6238 |
| ENV | AASITLTV | 618 | 8 | 36 | 56 | 6239 |
| ENV | IISFNCGGFW | 434 | 9 | 36 | 56 | 6240 |
| ENV | GAASITLTV | 617 | 9 | 36 | 56 | 6241 |
| ENV | LTVQARQLL | 623 | 9 | 36 | 56 | 6242 |
| ENV | ITQACPKV | 245 | 8 | 37 | 58 | 6243 |
| ENV | LTVQARQL | 623 | 8 | 38 | 59 | 6244 |
| ENV | QARQLLSGI | 626 | 9 | 38 | 59 | 6245 |
| ENV | QARQLLSGIV | 626 | 10 | 38 | 59 | 6246 |
| ENV | STMGAASI | 614 | 8 | 39 | 61 | 6247 |
| ENV | GSTMGAASI | 613 | 9 | 39 | 61 | 6248 |
| ENV | STMGAASITL | 614 | 10 | 39 | 61 | 6249 |
| ENV | GSTMGAASITL | 613 | 11 | 39 | 61 | 6250 |
| ENV | QACPKVSF | 248 | 8 | 40 | 63 | 6251 |
| ENV | CASDAKAY | 67 | 8 | 42 | 66 | 6252 |
| ENV | RAIEAQQIILL | 643 | 10 | 44 | 69 | 6253 |
| ENV | RAIEAQQIIL | 643 | 9 | 45 | 70 | 6254 |
| ENV | ISLWDQSL | 122 | 8 | 48 | 75 | 6255 |
| ENV | QSLKPCVKL | 127 | 9 | 48 | 75 | 6256 |
| ENV | RSELYKYKVV | 558 | 10 | 49 | 77 | 6257 |
| ENV | RSELYKYKV | 558 | 9 | 50 | 78 | 6258 |
| ENV | STVQCTIIGI | 289 | 9 | 51 | 80 | 6259 |
| ENV | VSTVQCTFIGI | 288 | 10 | 51 | 80 | 6260 |
| ENV | LTPLCVTL | 135 | 8 | 54 | 84 | 6261 |
| ENV | VTVYYGVPV | 47 | 9 | 55 | 86 | 6262 |
| ENV | VTVYYGVPVW | 47 | 10 | 55 | 86 | 6263 |
| ENV | STQLLLNGSL | 303 | 10 | 57 | 89 | 6264 |
| ENV | VSTQLLLNGSL | 302 | 11 | 57 | 89 | 6265 |
| ENV | LTVWGIKQL | 654 | 9 | 59 | 92 | 6266 |
| GAG | TAPPPESF | 508 | 8 | 01 | 33 | 6267 |
| GAG | ETIDKDLY | 537 | 8 | 01 | 25 | 6268 |
| GAG | PTAPPPESF | 507 | 9 | 01 | 33 | 6269 |
| GAG | TAPPPESFRF | 508 | 10 | 01 | 33 | 6270 |
| GAG | ETIDKDLYPL | 537 | 10 | 01 | 25 | 6271 |
| GAG | RTENSLYPPL | 538 | 10 | 01 | 25 | 6272 |
| GAG | AAAIMMQKSNF | 405 | 11 | 01 | 25 | 6273 |
| GAG | SATIMMQRGNF | 405 | 11 | 01 | 25 | 6274 |
| GAG | PTAPPPESFRF | 507 | 11 | 01 | 33 | 6275 |
| GAG | GAAAATDSNI | 123 | 10 | 01 | 50 | 6276 |
| GAG | AADKGVSQNY | 130 | 10 | 01 | 50 | 6277 |
| GAG | AAGTGNSSQV | 130 | 10 | 01 | 50 | 6278 |
| GAG | GANSIPVGDI | 276 | 10 | 01 | 50 | 6279 |
| GAG | SAQQDLKGGY | 393 | 10 | 01 | 50 | 6280 |
| GAG | TAQQDLKGGY | 393 | 10 | 01 | 50 | 6281 |
| GAG | GANSIPVGDIY | 276 | 11 | 01 | 50 | 6282 |
| GAG | ASAQQDLKGGY | 392 | 11 | 01 | 50 | 6283 |
| GAG | ATAQQDLKGGY | 392 | 11 | 01 | 50 | 6284 |
| GAG | PAEPTAPPAEI | 492 | 11 | 01 | 50 | 6285 |
| GAG | TAPPAESF | 508 | 8 | 02 | 67 | 6286 |
| GAG | PTAPPAESF | 507 | 9 | 02 | 67 | 6287 |
| GAG | TAPPAESFRF | 508 | 10 | 02 | 67 | 6288 |
| GAG | PTAPPAESFRF | 507 | 11 | 02 | 67 | 6289 |
| GAG | GTRPGNYV | 480 | 8 | 02 | 00 | 6290 |
| GAG | AADKGKVSQNY | 129 | 11 | 02 | 18 | 6291 |
| GAG | AADGKVSQNY | 129 | 10 | 04 | 36 | 6292 |
| GAG | AAIMMQKSNF | 406 | 10 | 06 | 15 | 6293 |
| GAG | TTPSQKQEPI | 522 | 10 | 09 | 45 | 6294 |
| GAG | GASLEEMM | 364 | 8 | 10 | 16 | 6295 |
| GAG | DTKEALEKI | 98 | 9 | 10 | 16 | 6296 |
| GAG | TAPPAESFGF | 496 | 10 | 10 | 16 | 6297 |
| GAG | QALSPRTLNAW | 166 | 11 | 10 | 16 | 6298 |
| GAG | PTAPPAESFGF | 495 | 11 | 10 | 16 | 6299 |
| GAG | AIIMMQRGNF | 406 | 10 | 11 | 28 | 6300 |
| GAG | PSQKQEPI | 528 | 8 | 11 | 18 | 6301 |
| GAG | SSKGRPGNF | 476 | 9 | 11 | 18 | 6302 |
| GAG | TTSTLQEQIAW | 260 | 11 | 11 | 17 | 6303 |
| GAG | QALSPRTL | 166 | 8 | 11 | 17 | 6304 |
| GAG | ASQEVKNW | 333 | 8 | 11 | 17 | 6305 |
| GAG | ASVLSGGEL | 5 | 9 | 11 | 17 | 6306 |
| GAG | QASQEVKNW | 332 | 9 | 11 | 17 | 6307 |
| GAG | ASQEVKNWM | 333 | 9 | 11 | 17 | 6308 |
| GAG | NANPDCKSI | 349 | 9 | 11 | 17 | 6309 |
| GAG | RASVLSGGEL | 4 | 10 | 11 | 17 | 6310 |
| GAG | QASQEVKNWM | 332 | 10 | 11 | 17 | 6311 |
| GAG | NANPDCKSIL | 349 | 10 | 11 | 17 | 6312 |
| GAG | PSSKGRPGNF | 475 | 10 | 11 | 17 | 6313 |
| GAG | QTGSEELRSL | 71 | 10 | 12 | 19 | 6314 |
| GAG | GSEELKSL | 73 | 8 | 12 | 19 | 6315 |
| GAG | GIEELRSL | 73 | 8 | 12 | 19 | 6316 |
| GAG | ATPQDLNM | 200 | 8 | 12 | 19 | 6317 |
| GAG | LTSLRSLF | 549 | 8 | 12 | 19 | 6318 |
| GAG | GSEELRSLY | 73 | 9 | 12 | 19 | 6319 |
| GAG | GATPQDLNM | 199 | 9 | 12 | 19 | 6320 |
| GAG | ATPQDLNMM | 200 | 9 | 12 | 19 | 6321 |
| GAG | STLQEQIAW | 262 | 9 | 12 | 19 | 6322 |
| GAG | RAEQASQEV | 329 | 9 | 12 | 19 | 6323 |
| GAG | KSLIGNDPL | 553 | 9 | 12 | 19 | 6324 |
| GAG | ATLYCVHQKI | 85 | 10 | 12 | 19 | 6325 |
| GAG | GATPQDLNMM | 199 | 10 | 12 | 19 | 6326 |
| GAG | ATPQDLNMML | 200 | 10 | 12 | 19 | 6327 |
| GAG | TSTLQEQIAW | 261 | 10 | 12 | 19 | 6328 |
| GAG | STLQEQIAWM | 262 | 10 | 12 | 19 | 6329 |
| GAG | VATLYCVIIQKI | 84 | 11 | 12 | 19 | 6330 |
| GAG | GATPQDLNMML | 199 | 11 | 12 | 19 | 6331 |
| GAG | TSTLQEQIAWM | 261 | 11 | 12 | 19 | 6332 |
| GAG | TSNPPIPVGEI | 272 | 11 | 12 | 19 | 6333 |
| GAG | LTSLKSLF | 549 | 8 | 13 | 20 | 6334 |
| GAG | YSPTSILDI | 301 | 9 | 13 | 20 | 6335 |
| GAG | PSLQTGSEEL | 68 | 10 | 13 | 20 | 6336 |
| GAG | NSSQVSQNY | 144 | 9 | 14 | 31 | 6337 |
| GAG | NSSQVSQNYPI | 144 | 11 | 14 | 31 | 6338 |
| GAG | TSEGCRQIL | 55 | 9 | 14 | 22 | 6339 |
| GAG | ETSEGCRQIL | 54 | 10 | 14 | 22 | 6340 |
| GAG | AAEWDRVHPV | 230 | 10 | 14 | 22 | 6341 |
| GAG | PSNKGRPGNF | 475 | 10 | 14 | 22 | 6342 |
| GAG | TAPPEESFRF | 496 | 10 | 14 | 22 | 6343 |
| GAG | EAAEWDRVIIPV | 229 | 11 | 14 | 22 | 6344 |
| GAG | PTAPPEESFRP | 495 | 11 | 14 | 22 | 6345 |
| GAG | SSQVSQNY | 145 | 8 | 15 | 31 | 6346 |
| GAG | SSQVSQNYPI | 145 | 10 | 15 | 31 | 6347 |
| GAG | SSQVSQNYPIV | 145 | 11 | 15 | 31 | 6348 |
| GAG | RSLYNTVATL | 78 | 10 | 15 | 24 | 6349 |
| GAG | RSLYNTVATLY | 78 | 11 | 15 | 24 | 6350 |
| GAG | EAAEWDRV | 229 | 8 | 15 | 23 | 6351 |
| GAG | ATQDVKNW | 333 | 8 | 15 | 23 | 6352 |
| GAG | TAPPEESF | 496 | 8 | 15 | 23 | 6353 |
| GAG | LASLKSLF | 549 | 8 | 15 | 23 | 6354 |
| GAG | RAEQATQDV | 329 | 9 | 15 | 23 | 6355 |
| GAG | QAIQDVKNW | 332 | 9 | 15 | 23 | 6356 |
| GAG | AIQDVKNWM | 333 | 9 | 15 | 23 | 6357 |
| GAG | PTAPPEESF | 495 | 9 | 15 | 23 | 6358 |
| GAG | ATLYCVIIQRI | 85 | 10 | 15 | 23 | 6359 |
| GAG | QATQDVKNWM | 332 | 10 | 15 | 23 | 6360 |
| GAG | VATLYCVIIQRI | 84 | 11 | 15 | 23 | 6361 |
| GAG | FAVNPGLL | 46 | 8 | 16 | 25 | 6362 |
| GAG | TSEGCRQI | 55 | 8 | 16 | 25 | 6363 |
| GAG | GSEELRSL | 73 | 8 | 16 | 25 | 6364 |
| GAG | TSNPPIPV | 272 | 8 | 16 | 25 | 6365 |
| GAG | PAATLEEM | 363 | 8 | 16 | 25 | 6366 |
| GAG | AATLEEMM | 364 | 8 | 16 | 25 | 6367 |
| GAG | LSGGKLDAW | 8 | 9 | 16 | 25 | 6368 |
| GAG | ETSEGCRQI | 54 | 9 | 16 | 25 | 6369 |
| GAG | MTSNPPIPV | 271 | 9 | 16 | 25 | 6370 |
| GAG | KALGPAATL | 359 | 9 | 16 | 25 | 6371 |
| GAG | PAATLEEMM | 363 | 9 | 16 | 25 | 6372 |
| GAG | DAWEKIRL | 14 | 8 | 17 | 27 | 6373 |
| GAG | LSPRTLNAW | 168 | 9 | 17 | 27 | 6374 |
| GAG | ASRELERFAV | 38 | 10 | 17 | 27 | 6375 |
| GAG | LSPRTLNAWV | 168 | 10 | 17 | 27 | 6376 |
| GAG | HAGPIPPGQM | 240 | 10 | 17 | 27 | 6377 |
| GAG | WASRELERFAY | 37 | 11 | 17 | 27 | 6378 |
| GAG | ATQEVKNW | 333 | 8 | 18 | 28 | 6379 |
| GAG | QATQEVKNW | 332 | 9 | 18 | 28 | 6380 |
| GAG | ATQEVKNWM | 333 | 9 | 18 | 28 | 6381 |
| GAG | HAGPIAPGQM | 240 | 10 | 18 | 28 | 6382 |
| GAG | QATQEVKNWM | 332 | 10 | 18 | 28 | 6383 |
| GAG | PSHKARVL | 380 | 8 | 19 | 30 | 6384 |
| GAG | TAPPAESF | 496 | 8 | 20 | 31 | 6385 |
| GAG | MTNNPPIPV | 271 | 9 | 20 | 31 | 6386 |
| GAG | PTAPPAESF | 495 | 9 | 20 | 31 | 6387 |
| GAG | FALNPGLL | 46 | 8 | 22 | 34 | 6388 |
| GAG | ASRELERFAL | 38 | 10 | 22 | 34 | 6389 |
| GAG | ETINEEAAEW | 224 | 10 | 22 | 34 | 6390 |
| GAG | WASRELERFAL | 37 | 11 | 22 | 34 | 6391 |
| GAG | PSIIKGRPGNF | 475 | 10 | 23 | 36 | 6392 |
| GAG | PSIIKGRPGNFL | 475 | 11 | 23 | 36 | 6393 |
| GAG | AAMQMLKETI | 217 | 10 | 26 | 41 | 6394 |
| GAG | QAAMQMLKETI | 216 | 11 | 26 | 41 | 6395 |
| GAG | TTSTLQEQIGW | 260 | 11 | 27 | 43 | 6396 |
| GAG | STLQEQIGW | 262 | 9 | 27 | 42 | 6397 |
| GAG | RAEQATQEV | 329 | 9 | 27 | 42 | 6398 |
| GAG | TSTLQEQIGW | 261 | 10 | 27 | 42 | 6399 |
| GAG | STLQEQIGWM | 262 | 10 | 27 | 42 | 6400 |
| GAG | TSTLQEQIGWM | 261 | 11 | 27 | 42 | 6401 |
| GAG | VSQNYPIVQNL | 149 | 11 | 28 | 48 | 6402 |
| GAG | ASVLSGGKL | 5 | 9 | 28 | 44 | 6403 |
| GAG | RASVLSGGKL | 4 | 10 | 28 | 44 | 6404 |
| GAG | QAISPRTL | 166 | 8 | 29 | 45 | 6405 |
| GAG | GATLEEMM | 364 | 8 | 29 | 45 | 6406 |
| GAG | QAISPRTLNAW | 166 | 11 | 29 | 45 | 6407 |
| GAG | RTLNAWVKVI | 171 | 10 | 30 | 47 | 6408 |
| GAG | RTLNAWVKVV | 171 | 10 | 31 | 48 | 6409 |
| GAG | DTINEEAAEW | 224 | 10 | 31 | 48 | 6410 |
| GAG | DTKEALDKI | 98 | 9 | 32 | 50 | 6411 |
| GAG | AAMQMLKDTI | 217 | 10 | 33 | 52 | 6412 |
| GAG | QAAMQMLKDTI | 216 | 11 | 33 | 52 | 6413 |
| GAG | AAEWDRLIIPV | 230 | 10 | 34 | 53 | 6414 |
| GAG | EAAEWDRLIIPV | 229 | 11 | 34 | 53 | 6415 |
| GAG | LAEAMSQV | 387 | 8 | 36 | 57 | 6416 |
| GAG | ISPRTLNAW | 168 | 9 | 36 | 56 | 6417 |
| GAG | ISPRTLNAWV | 168 | 10 | 36 | 56 | 6418 |
| GAG | EAAEWDRL | 229 | 8 | 39 | 61 | 6419 |
| GAG | YSPVSILDI | 301 | 9 | 40 | 63 | 6420 |
| GAG | NTVATLYCV | 82 | 9 | 41 | 64 | 6421 |
| GAG | ATPQDLNIM | 200 | 9 | 42 | 66 | 6422 |
| GAG | GATPQDLNTM | 199 | 10 | 42 | 66 | 6423 |
| GAG | ATPQDLNTML | 200 | 10 | 42 | 66 | 6424 |
| GAG | GATPQDLNTML | 199 | 11 | 42 | 66 | 6425 |
| GAG | TTSTLQEQI | 260 | 9 | 45 | 71 | 6426 |
| GAG | NANPDCKTI | 349 | 9 | 45 | 70 | 6427 |
| GAG | GTTSTLQEQI | 259 | 10 | 45 | 70 | 6428 |
| GAG | NANPDCKTIL | 349 | 10 | 45 | 70 | 6429 |
| GAG | ASRELERF | 38 | 8 | 46 | 72 | 6430 |
| GAG | WASRELERF | 37 | 9 | 46 | 72 | 6431 |
| GAG | TSTLQEQI | 261 | 8 | 47 | 73 | 6432 |
| GAG | NTVGGIIQAAM | 210 | 10 | 47 | 73 | 6433 |
| GAG | GSDIAGTTSTL | 254 | 11 | 47 | 73 | 6434 |
| GAG | VSQNYPIV | 149 | 8 | 48 | 83 | 6435 |
| GAG | IAGTTSTL | 257 | 8 | 48 | 75 | 6436 |
| GAG | KAFSPEVI | 183 | 8 | 50 | 78 | 6437 |
| GAG | KAFSPEVIFM | 183 | 10 | 50 | 78 | 6438 |
| GAG | KAFSPEVIFMF | 183 | 11 | 50 | 78 | 6439 |
| GAG | RAPRKKGCW | 439 | 9 | 53 | 83 | 6440 |
| GAG | FSPEVIFM | 185 | 8 | 54 | 84 | 6441 |
| GAG | ISPEVIFMF | 185 | 9 | 54 | 84 | 6442 |
| GAG | CTERQANF | 459 | 8 | 55 | 87 | 6443 |
| GAG | CTERQANFL | 459 | 9 | 55 | 87 | 6444 |
| GAG | QANFLGKI | 466 | 8 | 57 | 89 | 6445 |
| GAG | KARVLAEAM | 383 | 9 | 57 | 89 | 6446 |
| GAG | QANFLGKIW | 466 | 9 | 57 | 89 | 6447 |
| GAG | LSEGATPQDL | 196 | 10 | 58 | 91 | 6448 |
| GAG | RTLNAWVKV | 171 | 9 | 61 | 95 | 6449 |
| NEF | QAIEPAAAGV | 34 | 9 | 01 | 33 | 6450 |
| NEF | QTEPAAVGV | 32 | 9 | 01 | 17 | 6451 |
| NEF | RAEPAADGV | 32 | 9 | 01 | 17 | 6452 |
| NEF | RTEPAAVGV | 32 | 9 | 01 | 17 | 6453 |
| NEF | QAEPAAEGV | 33 | 9 | 01 | 17 | 6454 |
| NEF | QAPTAAKGV | 33 | 9 | 01 | 17 | 6455 |
| NEF | RAQAEPAAAGV | 32 | 11 | 01 | 17 | 6456 |
| NEF | GAFDLSPF | 110 | 8 | 10 | 16 | 6457 |
| NEF | GAFDLSFFL | 110 | 9 | 10 | 16 | 6458 |
| NEF | MARELIIPEY | 321 | 9 | 10 | 16 | 6459 |
| NEF | MARELIIPEYY | 321 | 10 | 10 | 16 | 6460 |
| NEF | AADGVGAV | 42 | 8 | 11 | 18 | 6461 |
| NEF | PAADGVGAV | 41 | 9 | 11 | 17 | 6462 |
| NEF | VSRDLEKIIGAI | 49 | 11 | 11 | 17 | 6463 |
| NEF | ATNADCAW | 71 | 8 | 12 | 22 | 6464 |
| NEF | AATNADCAW | 70 | 9 | 12 | 22 | 6465 |
| NEF | ATNADCAWL | 71 | 9 | 12 | 22 | 6466 |
| NEF | AATNADCAWL | 70 | 10 | 12 | 22 | 6467 |
| NEF | PAAEGVGAV | 41 | 9 | 12 | 19 | 6468 |
| NEF | MTYKGAFDL | 106 | 9 | 12 | 19 | 6469 |
| NEF | NIQGYFPDW | 194 | 9 | 12 | 19 | 6470 |
| NEF | TAATNADCAW | 69 | 10 | 12 | 19 | 6471 |
| NEF | GTRFPLTFGW | 213 | 10 | 12 | 19 | 6472 |
| NEF | NTAATNADCAW | 68 | 11 | 12 | 19 | 6473 |
| NEF | TAATNADCAWL | 69 | 11 | 12 | 19 | 6474 |
| NEF | GTRFPLTF | 213 | 8 | 13 | 20 | 6475 |
| NEF | YTPGPGTRF | 207 | 9 | 13 | 20 | 6476 |
| NEF | YTPGPGTRFPL | 207 | 11 | 13 | 20 | 6477 |
| NEF | HTQGFFPDW | 194 | 9 | 14 | 22 | 6478 |
| NEF | EAQEEEEV | 82 | 8 | 16 | 25 | 6479 |
| NEF | EAQEEEEVGF | 82 | 10 | 16 | 25 | 6480 |
| NEF | YTPGPGTRYPL | 207 | 11 | 16 | 25 | 6481 |
| NEF | AAEGVGAV | 42 | 8 | 17 | 28 | 6482 |
| NEF | YTPGPGIRY | 207 | 9 | 17 | 27 | 6483 |
| NEF | WSKSSIVGW | 5 | 9 | 20 | 31 | 6484 |
| NEF | YSKKRQEI | 176 | 8 | 22 | 34 | 6485 |
| NEF | YSKKRQEIL | 176 | 9 | 22 | 34 | 6486 |
| NEF | LSFFLKEKGGI | 114 | 11 | 22 | 34 | 6487 |
| NEF | YSKKRQEILDL | 176 | 11 | 22 | 34 | 6488 |
| NEF | IITQGYFPDW | 194 | 9 | 25 | 39 | 6489 |
| NEF | LSIIFLKEKGGL | 114 | 11 | 27 | 42 | 6490 |
| NEF | LTFGWCFKLV | 221 | 10 | 35 | 55 | 6491 |
| NEF | LTFGWCFKL | 221 | 9 | 39 | 61 | 6492 |
| POL | NSPTSREL | 34 | 8 | 01 | 33 | 6493 |
| POL | PTSRELQV | 36 | 8 | 01 | 33 | 6494 |
| POL | GTLNCPQI | 80 | 8 | 01 | 33 | 6495 |
| POL | PTFNFPQI | 80 | 8 | 01 | 33 | 6496 |
| POL | STNSPTSREL | 32 | 10 | 01 | 33 | 6497 |
| POL | NSPTSRELQV | 34 | 10 | 01 | 33 | 6498 |
| POL | RANSPSSREL | 35 | 10 | 01 | 33 | 6499 |
| POL | GTLNCPQITL | 80 | 10 | 01 | 33 | 6500 |
| POL | PTPNFPQITL | 80 | 10 | 01 | 33 | 6501 |
| POL | NSTNSPTSREL | 31 | 11 | 01 | 33 | 6502 |
| POL | GTLNCPQITLW | 80 | 11 | 01 | 33 | 6503 |
| POL | PTFNFPQITLW | 80 | 11 | 01 | 33 | 6504 |
| POL | NSPSSREL | 37 | 8 | 01 | 50 | 6505 |
| POL | NSPTTREL | 39 | 8 | 01 | 50 | 6506 |
| POL | PSSRELQV | 39 | 8 | 01 | 50 | 6507 |
| POL | NSPSSRELQV | 37 | 10 | 01 | 50 | 6508 |
| POL | RANSPTTREL | 37 | 10 | 01 | 50 | 6509 |
| POL | NSPTTRELQV | 39 | 10 | 01 | 50 | 6510 |
| POL | GADRQGIV | 70 | 8 | 01 | 20 | 6511 |
| POL | GSGRAVPI | 70 | 8 | 01 | 20 | 6512 |
| POL | GADRQGIVSF | 70 | 10 | 01 | 20 | 6513 |
| POL | GSGRAVPICL | 70 | 10 | 01 | 20 | 6514 |
| POL | GTTLNFPQI | 79 | 9 | 01 | 17 | 6515 |
| POL | GAISLSLPQI | 79 | 10 | 01 | 17 | 6516 |
| POL | GTTLNPPQITF | 79 | 11 | 01 | 17 | 6517 |
| POL | PSLSFPQI | 79 | 8 | 02 | 33 | 6518 |
| POL | PSLSFPQIIL | 79 | 10 | 02 | 33 | 6519 |
| POL | PSLSFPQIILW | 79 | 11 | 02 | 33 | 6520 |
| POL | SSFSFPQI | 82 | 8 | 03 | 30 | 6521 |
| POL | SSFSFPQITL | 82 | 10 | 03 | 30 | 6522 |
| POL | SSFSFPQITLW | 82 | 11 | 03 | 30 | 6523 |
| POL | VSFSFPQITLW | 78 | 11 | 07 | 15 | 6524 |
| POL | VSFSFPQI | 78 | 8 | 08 | 17 | 6525 |
| POL | VSFSFPQITL | 78 | 10 | 08 | 17 | 6526 |
| POL | ETWWTDYW | 591 | 8 | 10 | 16 | 6527 |
| POL | RANSPTSREL | 26 | 10 | 10 | 16 | 6528 |
| POL | ETWETWWTDY | 588 | 10 | 10 | 16 | 6529 |
| POL | ETWETWWTEY | 588 | 10 | 10 | 16 | 6530 |
| POL | QTKELQKQII | 961 | 10 | 10 | 16 | 6531 |
| POL | LAFPQGEAREF | 6 | 11 | 10 | 16 | 6532 |
| POL | RSAIITNDVKQL | 550 | 11 | 10 | 16 | 6533 |
| POL | EAVQKIATESI | 562 | 11 | 10 | 16 | 6534 |
| POL | ETWETWWTDYW | 588 | 11 | 10 | 16 | 6535 |
| POL | RTAHTNDV | 550 | 8 | 11 | 17 | 6536 |
| POL | WAGIQQEF | 884 | 8 | 11 | 17 | 6537 |
| POL | VTVKIGGQL | 98 | 9 | 11 | 17 | 6538 |
| POL | STNNETPGI | 323 | 9 | 11 | 17 | 6539 |
| POL | GTKALTEVI | 474 | 9 | 11 | 17 | 6540 |
| POL | GSNFTSTTV | 870 | 9 | 11 | 17 | 6541 |
| POL | GADDTVLEEM | 114 | 10 | 11 | 17 | 6542 |
| POL | ISRIGPENPY | 236 | 30 | 11 | 17 | 6543 |
| POL | PSTNNETPGI | 322 | 10 | 11 | 17 | 6544 |
| POL | TAIITNDVKQL | 551 | 10 | 11 | 17 | 6545 |
| POL | WAGIQQEFGI | 884 | 10 | 11 | 17 | 6546 |
| POL | STNNETPGIRY | 323 | 11 | 11 | 17 | 6547 |
| POL | ESWTVNDIQKL | 439 | 11 | 11 | 17 | 6548 |
| POL | GTKALTEVIFL | 474 | 11 | 11 | 17 | 6549 |
| POL | ESWTVNDI | 439 | 8 | 12 | 19 | 6550 |
| POL | KTELQAIY | 668 | 8 | 12 | 19 | 6551 |
| POL | KTELQAIYL | 668 | 9 | 12 | 19 | 6552 |
| POL | NSPTRRELQVW | 28 | 11 | 12 | 19 | 6553 |
| POL | TTNQKTELIIAI | 664 | 11 | 12 | 19 | 6554 |
| POL | KTELQAIYLAL | 668 | 11 | 12 | 19 | 6555 |
| POL | GAVVIQINSEI | 999 | 11 | 12 | 19 | 6556 |
| POL | KTGKYARM | 542 | 8 | 13 | 21 | 6557 |
| POL | WTVQPIVL | 428 | 8 | 13 | 20 | 6558 |
| POL | PTRRELQVW | 30 | 9 | 13 | 20 | 6559 |
| POL | DTVLEDINL | 117 | 9 | 13 | 20 | 6560 |
| POL | NSPTRRELQV | 28 | 10 | 13 | 20 | 6561 |
| POL | LAGRWPVKTI | 856 | 10 | 13 | 20 | 6562 |
| POL | RAKIEELREIIL | 388 | 11 | 13 | 20 | 6563 |
| POL | IATESIVI | 567 | 8 | 14 | 22 | 6564 |
| POL | IATESIVIW | 567 | 9 | 14 | 22 | 6565 |
| POL | NSPTSREL | 28 | 8 | 14 | 22 | 6566 |
| POL | PTRRELQV | 30 | 8 | 14 | 22 | 6567 |
| POL | FSFPQITLW | 85 | 9 | 14 | 22 | 6568 |
| POL | DTVLEEINL | 117 | 9 | 14 | 22 | 6569 |
| POL | WTDYWQATW | 594 | 9 | 14 | 22 | 6570 |
| POL | SAGERIVDI | 947 | 9 | 14 | 22 | 6571 |
| POL | ASDIQTKEL | 957 | 9 | 14 | 22 | 6572 |
| POL | WTDYWQAIWI | 594 | 10 | 14 | 22 | 6573 |
| POL | TSTTVKAACW | 874 | 10 | 14 | 22 | 6574 |
| POL | YSAGERIVDI | 946 | 10 | 14 | 22 | 6575 |
| POL | SAGERIYDII | 947 | 10 | 14 | 22 | 6576 |
| POL | IASDIQTKEL | 956 | 10 | 14 | 22 | 6577 |
| POL | RTKIEELRQIIL | 388 | 11 | 14 | 22 | 6578 |
| POL | FTSTTVKAACW | 873 | 11 | 14 | 22 | 6579 |
| POL | TSTTVKAACWW | 874 | 11 | 14 | 22 | 6580 |
| POL | YSAGERIVDII | 946 | 11 | 14 | 22 | 6581 |
| POL | KALVEICTEM | 219 | 10 | 15 | 24 | 6582 |
| POL | FSFPQITL | 85 | 8 | 15 | 23 | 6583 |
| POL | LTQLGCTL | 377 | 8 | 15 | 23 | 6584 |
| POL | RSAIITNDV | 550 | 8 | 15 | 23 | 6585 |
| POL | VSAGIRKV | 744 | 8 | 15 | 23 | 6586 |
| POL | SAGIRKVL | 745 | 8 | 15 | 23 | 6587 |
| POL | ITVKAACW | 876 | 8 | 15 | 23 | 6588 |
| POL | KTELQAIIIL | 668 | 9 | 15 | 23 | 6589 |
| POL | VSAGIRKVL | 744 | 9 | 15 | 23 | 6590 |
| POL | SAGIRKVLF | 745 | 9 | 15 | 23 | 6591 |
| POL | STTVKAACW | 875 | 9 | 15 | 23 | 6592 |
| POL | TTVKAACWW | 876 | 9 | 15 | 23 | 6593 |
| POL | GADDTVLEDI | 114 | 10 | 15 | 23 | 6594 |
| POL | LTQLGCTLNF | 177 | 10 | 15 | 23 | 6595 |
| POL | LTEEKIKALV | 213 | 10 | 15 | 23 | 6596 |
| POL | VSAGIRKVLF | 744 | 10 | 15 | 23 | 6597 |
| POL | SAGIRKVLFL | 745 | 10 | 15 | 23 | 6598 |
| POL | STTVKAACWW | 875 | 10 | 15 | 23 | 6599 |
| POL | KTELQAIIILAL | 668 | 11 | 15 | 23 | 6600 |
| POL | VSAGIRKVLFL | 744 | 11 | 15 | 23 | 6601 |
| POL | KAQEEIIERY | 759 | 9 | 16 | 25 | 6602 |
| POL | YSAGERIV | 946 | 8 | 16 | 25 | 6603 |
| POL | KALTEVIFL | 476 | 9 | 16 | 25 | 6604 |
| POL | RANSPTRREL | 26 | 10 | 16 | 25 | 6605 |
| POL | SAIITNDVKQL | 551 | 10 | 16 | 25 | 6606 |
| POL | NSPIRREL | 28 | 8 | 17 | 27 | 6607 |
| POL | VTIKIGGQL | 98 | 9 | 17 | 27 | 6608 |
| POL | KTPKFKLPI | 577 | 9 | 17 | 27 | 6609 |
| POL | GAKALTDIYPL | 474 | 11 | 17 | 27 | 6610 |
| POL | FSVPLDKDF | 305 | 9 | 18 | 28 | 6611 |
| POL | YAGIKVKQL | 460 | 9 | 18 | 28 | 6612 |
| POL | GADDTVLEELI | 114 | 10 | 18 | 28 | 6613 |
| POL | ITLWQRPLVTV | 90 | 11 | 18 | 28 | 6614 |
| POL | KIGKYAKM | 542 | 8 | 19 | 30 | 6615 |
| POL | GTKALTEV | 474 | 8 | 19 | 30 | 6616 |
| POL | ATESIVIW | 568 | 8 | 19 | 30 | 6617 |
| POL | GAIITNDVKQL | 551 | 10 | 19 | 30 | 6618 |
| POL | KSESELVNQI | 704 | 10 | 19 | 30 | 6619 |
| POL | KSESELVSQI | 704 | 10 | 19 | 30 | 6620 |
| POL | ITLWQRPLVTI | 90 | 11 | 19 | 30 | 6621 |
| POL | LTDTTNQKTEL | 661 | 11 | 19 | 30 | 6622 |
| POL | KSESELVNQII | 704 | 11 | 19 | 30 | 6623 |
| POL | KSESELVSQII | 704 | 11 | 19 | 30 | 6624 |
| POL | VSQIIEQL | 710 | 8 | 20 | 31 | 6625 |
| POL | VSQIIEQLI | 710 | 9 | 20 | 31 | 6626 |
| POL | MASDFNLPPIV | 774 | 11 | 20 | 31 | 6627 |
| POL | ESELVSQI | 706 | 8 | 21 | 33 | 6628 |
| POL | WAGIKQEF | 884 | 8 | 21 | 33 | 6629 |
| POL | KALTDIVPL | 476 | 9 | 21 | 33 | 6630 |
| POL | ESELVSQII | 706 | 9 | 21 | 33 | 6631 |
| POL | ASDFNLPPIV | 775 | 10 | 21 | 33 | 6632 |
| POL | WAGIKQEFGI | 884 | 10 | 21 | 33 | 6633 |
| POL | LAWVPAIIKGI | 725 | 10 | 22 | 34 | 6634 |
| POL | MASDFNLPPI | 774 | 10 | 22 | 34 | 6635 |
| POL | LAGRWPVKVI | 856 | 10 | 22 | 34 | 6636 |
| POL | ASDFNLPPI | 775 | 9 | 23 | 36 | 6637 |
| POL | CTIILEGKVIL | 817 | 10 | 23 | 36 | 6638 |
| POL | CTIILEGKVILV | 817 | 11 | 23 | 36 | 6639 |
| POL | GAKALTDIV | 474 | 9 | 24 | 38 | 6640 |
| POL | WTEYWQATW | 594 | 9 | 24 | 38 | 6641 |
| POL | WTEYWQATWI | 594 | 10 | 24 | 38 | 6642 |
| POL | PTPVNIIGRNM | 166 | 11 | 24 | 38 | 6643 |
| POL | GAKALTDI | 474 | 8 | 25 | 39 | 6644 |
| POL | DSGSEVNI | 680 | 8 | 25 | 39 | 6645 |
| POL | DSGSEVNIV | 680 | 9 | 25 | 39 | 6646 |
| POL | ASCWNLPPV | 775 | 9 | 25 | 39 | 6647 |
| POL | LALQDSGSEV | 676 | 10 | 25 | 39 | 6648 |
| POL | SSGIRKVLFL | 745 | 10 | 25 | 39 | 6649 |
| POL | MASDFNLPPV | 774 | 10 | 25 | 39 | 6650 |
| POL | ASDFNLPPV | 775 | 10 | 25 | 39 | 6651 |
| POL | LTETTNQKTEL | 661 | 11 | 25 | 39 | 6652 |
| POL | VSSGIRKVLFL | 744 | 11 | 25 | 39 | 6653 |
| POL | MASDFNLPPVV | 774 | 11 | 25 | 39 | 6654 |
| POL | ASQIYAGIKV | 456 | 10 | 26 | 41 | 6655 |
| POL | VSSGIRKV | 744 | 8 | 26 | 41 | 6656 |
| POL | SSGIRKVL | 745 | 8 | 26 | 41 | 6657 |
| POL | CTIILEGKV | 817 | 8 | 26 | 41 | 6658 |
| POL | PSKDLIAEI | 513 | 9 | 26 | 41 | 6659 |
| POL | DTTNQKTEL | 663 | 9 | 26 | 41 | 6660 |
| POL | VSSGIRKVL | 744 | 9 | 26 | 41 | 6661 |
| POL | SSGIRKVLF | 745 | 9 | 26 | 41 | 6662 |
| POL | CTIILEGKVI | 817 | 9 | 26 | 41 | 6663 |
| POL | GSNFTSAAV | 870 | 9 | 26 | 41 | 6664 |
| POL | VSSGIRKVLI | 744 | 10 | 26 | 41 | 6665 |
| POL | ETGQETAYFL | 844 | 10 | 26 | 41 | 6666 |
| POL | PTPVNIIGRNL | 166 | 11 | 26 | 41 | 6667 |
| POL | WASQIYAGIKV | 455 | 11 | 26 | 41 | 6668 |
| POL | ETGQETAYFLL | 844 | 11 | 26 | 41 | 6669 |
| POL | ASQIVAGI | 456 | 8 | 27 | 43 | 6670 |
| POL | KAQEEIIEKY | 759 | 9 | 27 | 43 | 6671 |
| POL | ASQIYPGIKV | 456 | 10 | 27 | 43 | 6672 |
| POL | LALQDSGL | 676 | 8 | 27 | 42 | 6673 |
| POL | ESELVNQI | 706 | 8 | 27 | 42 | 6674 |
| POL | TAYFLLKL | 849 | 8 | 27 | 42 | 6675 |
| POL | WASQIYAGI | 455 | 9 | 27 | 42 | 6676 |
| POL | ESELVNQI | 706 | 9 | 27 | 42 | 6677 |
| POL | ETAYFLLKL | 848 | 9 | 27 | 42 | 6678 |
| POL | CTEMEKEGKI | 225 | 10 | 27 | 42 | 6679 |
| POL | LALQDSGLEV | 676 | 10 | 27 | 42 | 6680 |
| POL | TSAAVKAACW | 874 | 10 | 27 | 42 | 6681 |
| POL | WASQIYPGIKV | 455 | 11 | 27 | 42 | 6682 |
| POL | FTSAAVKAACW | 873 | 11 | 27 | 42 | 6683 |
| POL | TSAAVKAACWW | 874 | 11 | 27 | 42 | 6684 |
| POL | WTVQPIQL | 428 | 8 | 28 | 44 | 6685 |
| POL | DSGLEVNI | 680 | 8 | 28 | 44 | 6686 |
| POL | AAVKAACW | 816 | 8 | 28 | 44 | 6687 |
| POL | DSGLEVNIV | 680 | 9 | 28 | 44 | 6688 |
| POL | SAAVKAACW | 875 | 9 | 28 | 44 | 6689 |
| POL | AAVKAACWW | 876 | 9 | 28 | 44 | 6690 |
| POL | VTDRGRQKVV | 650 | 10 | 28 | 44 | 6691 |
| POL | SAAVKAACWW | 875 | 10 | 28 | 44 | 6692 |
| POL | ASQIYPGI | 456 | 8 | 29 | 46 | 6693 |
| POL | WASQIYPGI | 455 | 9 | 29 | 45 | 6694 |
| POL | KTPKPRLPI | 577 | 9 | 29 | 45 | 6695 |
| POL | ETTNQKTEL | 663 | 9 | 29 | 45 | 6696 |
| POL | AANRETKL | 637 | 8 | 30 | 47 | 6697 |
| POL | GAANRETKL | 636 | 9 | 30 | 47 | 6698 |
| POL | VTDRGRQKV | 650 | 9 | 30 | 47 | 6699 |
| POL | LAGRWPVKV | 856 | 9 | 30 | 47 | 6700 |
| POL | KAACWWAGI | 879 | 9 | 31 | 49 | 6701 |
| POL | ETAYFILKL | 848 | 9 | 31 | 48 | 6702 |
| POL | PSINNETPGI | 322 | 10 | 31 | 48 | 6703 |
| POL | CTIILEGKIIL | 817 | 10 | 31 | 48 | 6704 |
| POL | ETGQETAYFI | 844 | 10 | 31 | 48 | 6705 |
| POL | CTHLEGKIILV | 817 | 11 | 31 | 48 | 6706 |
| POL | ETGQETAYFIL | 844 | 11 | 31 | 48 | 6707 |
| POL | TAYFILKL | 849 | 8 | 32 | 50 | 6708 |
| POL | AACWWAGI | 880 | 8 | 32 | 50 | 6709 |
| POL | IISNWRAMASDF | 768 | 11 | 32 | 50 | 6710 |
| POL | SSMTKILEPF | 351 | 10 | 33 | 52 | 6711 |
| POL | QSSMTKILEPF | 350 | 11 | 33 | 52 | 6712 |
| POL | LTEAVQKI | 560 | 8 | 34 | 53 | 6713 |
| POL | CTIILEGKI | 817 | 8 | 35 | 55 | 6714 |
| POL | ETKLGKAGY | 641 | 9 | 35 | 55 | 6715 |
| POL | CTIILEGKII | 817 | 9 | 35 | 55 | 6716 |
| POL | ATDIQTKEL | 957 | 9 | 35 | 55 | 6717 |
| POL | ETKLGKAGYV | 641 | 10 | 35 | 55 | 6718 |
| POL | IATDIQTKEL | 956 | 10 | 35 | 55 | 6719 |
| POL | ITKIQNFRV | 969 | 9 | 36 | 57 | 6720 |
| POL | ITKIQNFRVY | 969 | 10 | 36 | 57 | 6721 |
| POL | ITKIQNFRVYY | 969 | 11 | 36 | 57 | 6722 |
| POL | PAIFQSSMTKI | 346 | 11 | 36 | 56 | 6723 |
| POL | QAQPDKSESEL | 699 | 11 | 36 | 56 | 6724 |
| POL | TAFTIPSI | 317 | 8 | 37 | 58 | 6725 |
| POL | YTAFTIPSI | 316 | 9 | 37 | 58 | 6726 |
| POL | LTEEAELEL | 484 | 9 | 37 | 58 | 6727 |
| POL | LSWVPAIIKGI | 725 | 10 | 37 | 58 | 6728 |
| POL | GAVVIQDNSDI | 999 | 11 | 37 | 58 | 6729 |
| POL | QSSMTKIL | 350 | 8 | 38 | 59 | 6730 |
| POL | KAKIIRDY | 1017 | 8 | 41 | 64 | 6731 |
| POL | RAMASDFNL | 772 | 9 | 41 | 64 | 6732 |
| POL | SAGERIIDI | 947 | 9 | 41 | 64 | 6733 |
| POL | LTQIGCTLNF | 177 | 10 | 41 | 64 | 6734 |
| POL | YSAGERIIDI | 946 | 10 | 41 | 64 | 6735 |
| POL | SAGERIIDII | 947 | 10 | 41 | 64 | 6736 |
| POL | YSAGERIIDII | 946 | 11 | 41 | 64 | 6737 |
| POL | LTQIGCTL | 177 | 8 | 42 | 66 | 6738 |
| POL | PAIFQSSM | 346 | 8 | 42 | 66 | 6739 |
| POL | YSAGERII | 946 | 8 | 42 | 66 | 6740 |
| POL | ISKIGPENPY | 236 | 10 | 42 | 66 | 6741 |
| POL | GSPAIFQSSM | 344 | 10 | 42 | 66 | 6742 |
| POL | WTYQIYQEPF | 529 | 10 | 42 | 66 | 6743 |
| POL | TTNQKTELQAI | 664 | 11 | 42 | 66 | 6744 |
| POL | DSWTVNDI | 439 | 8 | 43 | 67 | 6745 |
| POL | ASCDKCQL | 790 | 8 | 43 | 67 | 6746 |
| POL | VASCDKCQL | 789 | 9 | 43 | 67 | 6747 |
| POL | DSWTVNDIQKL | 439 | 11 | 43 | 67 | 6748 |
| POL | MTKILEPF | 353 | 8 | 44 | 69 | 6749 |
| POL | QPKELQKQI | 961 | 9 | 46 | 72 | 6750 |
| POL | ITLWQRPL | 90 | 8 | 47 | 73 | 6751 |
| POL | ITLWQRPLV | 90 | 9 | 47 | 73 | 6752 |
| POL | KAIGTVLV | 157 | 8 | 48 | 75 | 6753 |
| POL | IITNDVKQL | 553 | 8 | 49 | 77 | 6754 |
| POL | PAGLKKKKSV | 286 | 10 | 50 | 78 | 6755 |
| POL | QATWIPEWLFV | 599 | 11 | 51 | 81 | 6756 |
| POL | KSVTVLDV | 293 | 8 | 51 | 80 | 6757 |
| POL | IITDNGSNF | 866 | 8 | 51 | 80 | 6758 |
| POL | ATWIPEWEFV | 600 | 10 | 51 | 80 | 6759 |
| POL | ETVPVKLKPGM | 192 | 11 | 51 | 80 | 6760 |
| POL | ETPGIRYQYNV | 327 | 11 | 51 | 80 | 6761 |
| POL | QATWIPEWEF | 599 | 10 | 52 | 83 | 6762 |
| POL | ETPGIRYQY | 327 | 9 | 52 | 81 | 6763 |
| POL | ATWIPEWEF | 600 | 9 | 52 | 81 | 6764 |
| POL | VASGYIEAEV | 831 | 10 | 52 | 81 | 6765 |
| POL | VASGYIEAEVI | 831 | 11 | 52 | 81 | 6766 |
| POL | ASGYIEAEV | 832 | 9 | 53 | 83 | 6767 |
| POL | QSQGVVESM | 898 | 9 | 53 | 83 | 6768 |
| POL | GTVLVGPTPV | 160 | 10 | 53 | 83 | 6769 |
| POL | RTQDFWEVQL | 272 | 10 | 53 | 83 | 6770 |
| POL | VAVIIVASGYI | 827 | 10 | 53 | 83 | 6771 |
| POL | ASGYIEAEVI | 832 | 10 | 53 | 83 | 6772 |
| POL | ESMNKELKKI | 904 | 10 | 53 | 83 | 6773 |
| POL | ISPIETVPVKL | 188 | 11 | 53 | 83 | 6774 |
| POL | ESMNKELKKII | 904 | 11 | 53 | 83 | 6775 |
| POL | QATWIPEW | 599 | 8 | 54 | 86 | 6776 |
| POL | RTQDFWEV | 272 | 8 | 55 | 86 | 6777 |
| POL | DAYFSVPL | 302 | 8 | 55 | 86 | 6778 |
| POL | TTNQKTEL | 664 | 8 | 55 | 86 | 6779 |
| POL | ISPIETYPY | 188 | 9 | 56 | 88 | 6780 |
| POL | LTEEKIKAL | 213 | 9 | 56 | 88 | 6781 |
| POL | VTVLDVGDAY | 295 | 10 | 56 | 88 | 6782 |
| POL | KTAVQMAVFI | 925 | 10 | S6 | 88 | 6783 |
| POL | VTVLDVGDAYF | 295 | 11 | 56 | 88 | 6784 |
| POL | PAETGQETAYF | 842 | 11 | 56 | 88 | 6785 |
| POL | LAENREIL | 492 | 8 | 57 | 89 | 6786 |
| POL | NTPPLVKL | 610 | 8 | 57 | 89 | 6787 |
| POL | CSPGIWQL | 808 | 8 | 57 | 89 | 6788 |
| POL | KTAVQMAV | 925 | 8 | 57 | 89 | 6789 |
| POL | NTPPLVKLW | 610 | 9 | 57 | 89 | 6790 |
| POL | ETGQETAYF | 844 | 9 | 57 | 89 | 6791 |
| POL | KTAVQMAVF | 925 | 9 | 57 | 89 | 6792 |
| POL | NTPPLVKLWY | 610 | 10 | 57 | 89 | 6793 |
| POL | FAIKKKDSTKW | 250 | 11 | 57 | 89 | 6794 |
| POL | QAEIILKTAVQM | 920 | 11 | 57 | 89 | 6795 |
| POL | STKWRKLVDI | 257 | 10 | 58 | 91 | 6796 |
| POL | VTDSQYALGI | 688 | 10 | 58 | 91 | 6797 |
| POL | PAETGQETAY | 842 | 10 | 58 | 91 | 6798 |
| POL | DSTKWRKLVDF | 256 | 11 | 58 | 91 | 6799 |
| POL | VTDSQYALGII | 688 | 11 | 58 | 91 | 6800 |
| POL | DSTKWRKL | 256 | 8 | 59 | 92 | 6801 |
| POL | STKWRKLV | 257 | 8 | 59 | 92 | 6802 |
| POL | VTDSQYAL | 688 | 8 | 59 | 92 | 6803 |
| POL | DSQYALGI | 690 | 8 | 59 | 92 | 6804 |
| POL | ETGQETAY | 844 | 8 | 59 | 92 | 6805 |
| POL | DSTKWRKLV | 256 | 9 | 59 | 92 | 6806 |
| POL | DSQYALGII | 690 | 9 | 59 | 92 | 6807 |
| POL | VAVIIVASGY | 827 | 9 | 59 | 92 | 6808 |
| POL | QAEIILKTAV | 920 | 9 | 59 | 92 | 6809 |
| POL | TAVQMAVFI | 926 | 9 | 59 | 92 | 6810 |
| POL | MAVFIIINF | 930 | 8 | 60 | 94 | 6811 |
| POL | CTLNPPISPI | 182 | 10 | 60 | 94 | 6812 |
| POL | TAVQMAVP | 926 | 8 | 61 | 95 | 6813 |
| POL | DTGADDTVL | 112 | 9 | 61 | 95 | 6814 |
| POL | WTVNDIQKLV | 441 | 10 | 61 | 95 | 6815 |
| POL | WTVNDIQKL | 441 | 9 | 62 | 97 | 6816 |
| POL | DTGADDTV | 112 | 8 | 63 | 98 | 6817 |
| REV | RARQRQIIISI | 50 | 10 | 10 | 16 | 6818 |
| REV | GTQGVGSPQI | 97 | 10 | 11 | 18 | 6819 |
| REV | RSAEPVPL | 70 | 8 | 12 | 19 | 6820 |
| REV | SAEPVPLQL | 71 | 9 | 12 | 19 | 6821 |
| REV | RSAEPVPLQL | 70 | 10 | 12 | 19 | 6822 |
| REV | RSGDSDEELL | 4 | 10 | 16 | 25 | 6823 |
| REV | QARKNRRRRW | 40 | 10 | 16 | 25 | 6824 |
| REV | RSGDSDEEL | 4 | 9 | 17 | 27 | 6825 |
| REV | GTSGTQGV | 94 | 8 | 21 | 33 | 6826 |
| REV | PAEPVPLQL | 71 | 9 | 21 | 33 | 6827 |
| REV | QARRNRRRRW | 40 | 10 | 38 | 59 | 6828 |
| TAT | PTGPKESKKKV | 88 | 11 | 12 | 19 | 6829 |
| VIF | KSLVKYHM | 22 | 8 | 10 | 16 | 6830 |
| VIF | FSDSAIRKAI | 120 | 10 | 10 | 16 | 6831 |
| VIF | YSTQIDPDL | 99 | 9 | 11 | 17 | 6832 |
| VIF | YSTQVDPGL | 99 | 9 | 11 | 17 | 6833 |
| VIF | STQVDPGL | 100 | 8 | 11 | 17 | 6834 |
| VIF | KSLVKIIIIMYI | 22 | 10 | 11 | 17 | 6835 |
| VIF | VSIEWRLRRY | 88 | 10 | 11 | 17 | 6836 |
| VIF | PSESAIRKAIL | 120 | 11 | 11 | 17 | 6837 |
| VIF | GSLQYLALKAL | 148 | 11 | 11 | 17 | 6838 |
| VIF | STQIDPDL | 100 | 8 | 12 | 19 | 6839 |
| VIF | ESAIRNAI | 122 | 8 | 12 | 19 | 6840 |
| VIF | SAIRNAIL | 123 | 8 | 12 | 19 | 6841 |
| VIF | QTGERDWIIL | 75 | 9 | 12 | 19 | 6842 |
| VIF | ESAIRNAIL | 122 | 9 | 12 | 19 | 6843 |
| VIF | KTKPPLPSV | 164 | 9 | 12 | 19 | 6844 |
| VIF | PSESAIRKAI | 120 | 10 | 12 | 19 | 6845 |
| VIF | PSESAIRNAI | 120 | 10 | 12 | 19 | 6846 |
| VIF | PSESAIRNAIL | 120 | 11 | 12 | 19 | 6847 |
| VIF | GSLQYLALAAL | 148 | 11 | 12 | 19 | 6848 |
| VIF | LADQLIIIMIIY | 107 | 10 | 13 | 20 | 6849 |
| VIF | ESRIIPKVSSIW | 45 | 11 | 13 | 20 | 6850 |
| VIF | LADQLIIIMIIYF | 107 | 11 | 13 | 20 | 6851 |
| VIF | PSVKKLTEDRW | 173 | 11 | 13 | 20 | 6852 |
| VIF | NSLVKIIIIMYV | 22 | 10 | 14 | 22 | 6853 |
| VIF | LADQLIIILYY | 107 | 10 | 14 | 22 | 6854 |
| VIF | RIWKSLVKIIIIM | 19 | 11 | 14 | 22 | 6855 |
| VIF | LADQLIIILYYF | 107 | 11 | 14 | 22 | 6856 |
| VIF | LADQLIIILY | 107 | 9 | 15 | 23 | 6857 |
| VIF | KTKGIIRGSIITM | 188 | 11 | 15 | 23 | 6858 |
| VIF | ESAIRKAIL | 122 | 9 | 16 | 25 | 6859 |
| VIF | LADQLIIIM | 107 | 8 | 17 | 27 | 6860 |
| VIF | ESAIRKAI | 122 | 8 | 17 | 27 | 6861 |
| VIF | KSLVKIIIIM | 22 | 8 | 18 | 28 | 6862 |
| VIF | KSLVKIIIIMY | 22 | 9 | 18 | 28 | 6863 |
| VIF | DSAIRKAIL | 122 | 9 | 19 | 30 | 6864 |
| VIF | DSAIRKAI | 122 | 8 | 20 | 31 | 6865 |
| VIF | HTGERDWIIL | 75 | 9 | 21 | 33 | 6866 |
| VIF | NSLVKHHMY | 22 | 9 | 24 | 38 | 6867 |
| VIF | RTWNSLVKIIIIM | 19 | 11 | 24 | 38 | 6868 |
| VIF | LADQLIIIL | 107 | 8 | 25 | 39 | 6869 |
| VIF | NSLVKIIIIM | 22 | 8 | 27 | 42 | 6870 |
| VIF | ISSEVIIIPL | 51 | 9 | 27 | 42 | 6871 |
| VIF | VSSEVHIPL | 51 | 9 | 27 | 42 | 6872 |
| VIF | GSLQYLALTAL | 148 | 11 | 31 | 48 | 6873 |
| VIF | SAIRKAIL | 123 | 8 | 35 | 55 | 6874 |
| VIF | QAGIINKVGSL | 141 | 10 | 38 | 59 | 6875 |
| VIF | SSEVIIIPL | 52 | 8 | 55 | 86 | 6876 |
| VIF | GSLQYLAL | 148 | 8 | 58 | 91 | 6877 |
| VPR | WALELLEEL | 18 | 9 | 09 | 15 | 6878 |
| VPR | ETYGDTWTGV | 48 | 10 | 11 | 17 | 6879 |
| VPR | EAVRIIPPRI | 29 | 9 | 14 | 22 | 6880 |
| VPR | EAVRIIPPRIW | 29 | 10 | 14 | 22 | 6881 |
| VPR | EAVRIIFPRIWL | 29 | 11 | 14 | 22 | 6882 |
| VPR | KSEAVRIIP | 27 | 5 | 15 | 23 | 6883 |
| VPR | WAGVEAIIRI | 54 | 10 | 15 | 23 | 6884 |
| VPR | WAGVEAIIRIL | 54 | 11 | 15 | 23 | 6885 |
| VPR | WAGVEAII | 54 | 8 | 16 | 25 | 6886 |
| VPR | DTWAGVEAI | 52 | 9 | 16 | 25 | 6887 |
| VPR | ETYGDTWAGV | 48 | 10 | 16 | 25 | 6888 |
| VPR | NTYGDTWEGV | 48 | 10 | 16 | 25 | 6889 |
| VPR | DTWAGVEAII | 52 | 10 | 16 | 25 | 6890 |
| VPR | DTWEGVEAII | 52 | 10 | 19 | 30 | 6891 |
| VPR | DTWEGVEAI | 52 | 9 | 20 | 31 | 6892 |
| VPR | EAIIRILQQL | 58 | 10 | 33 | 52 | 6893 |
| VPR | EAIIRILQQLL | 58 | 11 | 33 | 52 | 6894 |
| VPR | EAVRIIFPRPW | 29 | 10 | 34 | 53 | 6895 |
| VPR | EAVRIIFPRPWL | 29 | 11 | 34 | 53 | 6896 |
| VPR | WTLELLEEL | 18 | 9 | 42 | 69 | 6897 |
| VPU | LAKYDYRI | 5 | 8 | 01 | 25 | 6898 |
| VPU | LAKVDYRL | 5 | 8 | 01 | 25 | 6899 |
| VPU | LAKVDYRIV | 5 | 9 | 01 | 25 | 6900 |
| VPU | LAKVDYRIVI | 5 | 10 | 01 | 25 | 6901 |
| VPU | LAKVDYRLGV | 5 | 10 | 01 | 25 | 6902 |
| VPU | LAKVDYRIVIV | 5 | 11 | 01 | 25 | 6903 |
| VPU | VTLLSSSKL | 94 | 9 | 01 | 50 | 6904 |
| VPU | LAIVALVV | 13 | 8 | 12 | 20 | 6905 |
| VPU | WTIVFIEY | 34 | 8 | 12 | 19 | 6906 |
| VPU | ESEGDQEEL | 73 | 9 | 13 | 20 | 6907 |
| VPU | ESEGDTEEL | 75 | 9 | 13 | 20 | 6908 |
| VPU | IAIVVWTIV | 28 | 9 | 20 | 31 | 6909 |
| VPU | IAIVVWTI | 28 | 8 | 23 | 36 | 6910 |

[0394] TABLE XIV

HIV B62 Super Motif Peptides

| | | | | | | |
|---|---|---|---|---|---|---|
| | | | | Se- | | |
| | | | No. of | quence | Conser- | SEQ |
| Pro- | | Posi- | Amino | Fre- | vancy | ID |
| tein | Sequence | tion | Acids | quency | (%) | NO. |

| | | | | | | |
|---|---|---|---|---|---|---|
| ENV | GIGPGQTF | 360 | 8 | 01 | 33 | 6911 |
| ENV | SIGSGQAF | 360 | 8 | 01 | 33 | 6912 |
| ENV | KLREIRQF | 405 | 8 | 01 | 25 | 6913 |
| ENV | EPDRPERI | 823 | 8 | 01 | 33 | 6914 |
| ENV | PPDRPEGI | 823 | 8 | 01 | 33 | 6915 |
| ENV | GIGPGQTFY | 360 | 9 | 01 | 33 | 6916 |
| ENV | SIGSGQAFY | 360 | 9 | 01 | 33 | 6917 |
| ENV | SIGSGQAFYV | 360 | 10 | 01 | 33 | 6918 |
| ENV | KQLYATVY | 34 | 8 | 01 | 50 | 6919 |
| ENV | QLYATVYAGV | 34 | 10 | 01 | 50 | 6920 |
| ENV | KQLYATVYSGV | 34 | 11 | 01 | 50 | 6921 |
| ENV | TIGAMFLGF | 599 | 9 | 03 | 27 | 6922 |
| ENV | MLGAMFLGF | 599 | 9 | 04 | 36 | 6923 |
| ENV | SLRGLQRGW | 889 | 9 | 05 | 18 | 6924 |
| ENV | RLGWEGLKYLW | 894 | 11 | 07 | 23 | 6925 |
| ENV | RLGWEGLKY | 894 | 9 | 09 | 29 | 6926 |
| ENV | GLRLGWEGLKY | 892 | 11 | 09 | 29 | 6927 |
| ENV | LILGLVII | 21 | 8 | 09 | 15 | 6928 |
| ENV | IPRRIRQGF | 950 | 9 | 10 | 16 | 6929 |
| ENV | ALFYKLDV | 202 | 8 | 10 | 16 | 6930 |
| ENV | IIMLQLTVW | 650 | 8 | 10 | 16 | 6931 |
| ENV | DITNWLWY | 769 | 8 | 10 | 16 | 6932 |
| ENV | DIRQAIICNV | 380 | 9 | 10 | 16 | 6933 |
| ENV | LPCRIKQIV | 485 | 9 | 10 | 16 | 6934 |
| ENV | MLQLTVWGI | 651 | 9 | 10 | 16 | 6935 |
| ENV | DITNWLWYI | 769 | 9 | 10 | 16 | 6936 |
| ENV | SQELKNSAV | 911 | 9 | 10 | 16 | 6937 |
| ENV | PIIIYCTPAGF | 260 | 10 | 10 | 16 | 6938 |
| ENV | TLPCRIKQIV | 484 | 10 | 10 | 16 | 6939 |
| ENV | IPIIIYCTPAGF | 259 | 11 | 10 | 16 | 6940 |
| ENV | RVGQAMYAPPI | 498 | 11 | 10 | 16 | 6941 |
| ENV | WMEWEREIDNY | 723 | 11 | 10 | 16 | 6942 |
| ENV | ALDKWASLWNW | 757 | 11 | 10 | 16 | 6943 |
| ENV | SLKGLRLGW | 889 | 9 | 11 | 39 | 6944 |
| ENV | GIGAVFLGF | 598 | 9 | 11 | 18 | 6945 |
| ENV | KLWVTVYY | 44 | 8 | 11 | 17 | 6946 |
| ENV | AVGIGAVF | 595 | 8 | 11 | 17 | 6947 |
| ENV | KLWVTVYYGV | 44 | 10 | 11 | 17 | 6948 |
| ENV | AVGIGAVFLGF | 595 | 11 | 11 | 17 | 6949 |
| ENV | RIGPGQTF | 357 | 8 | 11 | 17 | 6950 |
| ENV | NITLPCRI | 482 | 8 | 11 | 17 | 6951 |
| ENV | WQRVGQAM | 496 | 8 | 11 | 17 | 6952 |
| ENV | QIRCSSNI | 512 | 8 | 11 | 17 | 6953 |
| ENV | ALFYRLDVV | 202 | 9 | 11 | 17 | 6954 |
| ENV | GPCTNVSTV | 283 | 9 | 11 | 17 | 6955 |
| ENV | RIGPGQTFY | 357 | 9 | 11 | 17 | 6956 |
| ENV | WQRVGQAMY | 496 | 9 | 11 | 17 | 6957 |
| ENV | GQIRCSSNI | 511 | 9 | 11 | 17 | 6958 |
| ENV | ALDKWASLW | 757 | 9 | 11 | 17 | 6959 |
| ENV | AVSLLNATAI | 918 | 10 | 11 | 17 | 6960 |
| ENV | NITLPCRIKQI | 482 | 11 | 11 | 17 | 6961 |
| ENV | VVEREKRAVGI | 588 | 11 | 11 | 17 | 6962 |
| ENV | LLALDKWASLW | 755 | 11 | 11 | 17 | 6963 |
| ENV | NMWKNDMV | 107 | 8 | 12 | 19 | 6964 |
| ENV | ALFYRLDV | 202 | 8 | 12 | 19 | 6965 |
| ENV | RIKQIVNM | 488 | 8 | 12 | 19 | 6966 |
| ENV | KLICTTTV | 687 | 8 | 12 | 19 | 6967 |
| ENV | WMEWEREI | 723 | 8 | 12 | 19 | 6968 |
| ENV | ILKCNDKKF | 271 | 9 | 12 | 19 | 6969 |
| ENV | RIKQIVNMW | 488 | 9 | 12 | 19 | 6970 |
| ENV | LICTTTVPW | 688 | 9 | 12 | 19 | 6971 |
| ENV | GQELKNSAI | 911 | 9 | 12 | 19 | 6972 |
| ENV | AILIIIPRRI | 946 | 9 | 12 | 19 | 6973 |
| ENV | AILKCNDKKF | 270 | 10 | 12 | 19 | 6974 |
| ENV | KLICTTTVPW | 687 | 10 | 12 | 19 | 6975 |
| ENV | NMTWMEWEREI | 720 | 11 | 12 | 19 | 6976 |
| ENV | IVGGLIGRII | 783 | 11 | 12 | 19 | 6977 |
| ENV | ELYKYKVVEI | 560 | 10 | 13 | 21 | 6978 |
| ENV | DPNPQEVV | 91 | 8 | 13 | 20 | 6979 |
| ENV | HLLKLTVW | 650 | 8 | 13 | 20 | 6980 |
| ENV | NVPWNSSW | 693 | 8 | 13 | 20 | 6981 |
| ENV | EIWDNMTW | 716 | 8 | 13 | 20 | 6982 |
| ENV | SIRLVNGF | 842 | 8 | 13 | 20 | 6983 |
| ENV | SIRLYSGF | 842 | 8 | 13 | 20 | 6984 |
| ENV | RLRDLLLI | 867 | 8 | 13 | 20 | 6985 |
| ENV | ILIIIPRRI | 947 | 8 | 13 | 20 | 6986 |
| ENV | EIKNCSFNI | 181 | 9 | 13 | 20 | 6987 |
| ENV | AITQACPKV | 244 | 9 | 13 | 20 | 6988 |
| ENV | SLAEEEVVI | 311 | 9 | 13 | 20 | 6989 |
| ENV | QQHLLKLTV | 648 | 9 | 13 | 20 | 6990 |
| ENV | LLKLTVWGI | 651 | 9 | 13 | 20 | 6991 |
| ENV | AQQIILLKLTV | 647 | 10 | 13 | 20 | 6992 |
| ENV | QQHLLKLTVW | 648 | 10 | 13 | 20 | 6993 |
| ENV | HLLKLTVWGI | 650 | 10 | 13 | 20 | 6994 |
| ENV | EQELLELDKW | 752 | 10 | 13 | 20 | 6995 |
| ENV | VPTDPNPQEVV | 88 | 11 | 13 | 20 | 6996 |
| ENV | VMHSFNCGGEF | 432 | 11 | 13 | 20 | 6997 |
| ENV | TITLPCRIKQI | 482 | 11 | 13 | 20 | 6998 |
| ENV | AQQHLLKLTVW | 647 | 11 | 13 | 20 | 6999 |
| ENV | SLAEEEVV | 311 | 8 | 14 | 22 | 7000 |
| ENV | TITLPCRI | 482 | 8 | 14 | 22 | 7001 |
| ENV | SLLNATAI | 920 | 8 | 14 | 22 | 7002 |
| ENV | DPEIVMIISF | 428 | 9 | 14 | 22 | 7003 |
| ENV | GQAMYAPPI | 501 | 9 | 14 | 22 | 7004 |
| ENV | RIIFAVLSI | 791 | 9 | 14 | 22 | 7005 |
| ENV | AVAEGTDRV | 928 | 9 | 14 | 22 | 7006 |
| ENV | EQDLLALDKW | 752 | 10 | 14 | 22 | 7007 |
| ENV | RIIFAVLSIV | 791 | 10 | 14 | 22 | 7008 |
| ENV | SLLNATAIAV | 920 | 10 | 14 | 22 | 7009 |
| ENV | AVAEGTDRVI | 928 | 10 | 14 | 22 | 7010 |
| ENV | VITQACPKVSF | 244 | 11 | 14 | 22 | 7011 |
| ENV | GLRIIFAVLSI | 789 | 11 | 14 | 22 | 7012 |
| ENV | AIAVAEGTDRV | 926 | 11 | 14 | 22 | 7013 |
| ENV | RLINCNTSAI | 236 | 10 | 15 | 24 | 7014 |
| ENV | GLIGLRII | 786 | 8 | 15 | 23 | 7015 |
| ENV | IIFAVLSI | 792 | 8 | 15 | 23 | 7016 |
| ENV | GPDRPEGI | 822 | 8 | 15 | 23 | 7017 |
| ENV | LINCNTSAI | 237 | 9 | 15 | 23 | 7018 |
| ENV | VITQACPKV | 244 | 9 | 15 | 23 | 7019 |
| ENV | GPCKNVSTV | 283 | 9 | 15 | 23 | 7020 |
| ENV | DIRQAHCNI | 380 | 9 | 15 | 23 | 7021 |
| ENV | GLIGLRIIF | 786 | 9 | 15 | 23 | 7022 |
| ENV | IIFAVLSIV | 792 | 9 | 15 | 23 | 7023 |
| ENV | LLNATAIAV | 921 | 9 | 15 | 23 | 7024 |
| ENV | SVITQACPKV | 243 | 10 | 15 | 23 | 7025 |
| ENV | TLPCRIKQII | 484 | 10 | 15 | 23 | 7026 |
| ENV | NMWQEVGKAM | 494 | 10 | 15 | 23 | 7027 |
| ENV | AVAEGTDRII | 928 | 10 | 15 | 23 | 7028 |
| ENV | NMWQEVGKAMY | 494 | 11 | 15 | 23 | 7029 |
| ENV | GLIGLRIIFAV | 786 | 11 | 15 | 23 | 7030 |
| ENV | LIGLRIIF | 787 | 8 | 16 | 25 | 7031 |
| ENV | VVQREKRAV | 588 | 9 | 16 | 25 | 7032 |
| ENV | AVAEGTDRI | 928 | 9 | 16 | 25 | 7033 |
| ENV | RVVQREKRAV | 587 | 10 | 16 | 25 | 7034 |
| ENV | LIGLRIIFAV | 787 | 10 | 16 | 25 | 7035 |
| ENV | LVSGFLALAW | 845 | 10 | 16 | 25 | 7036 |
| ENV | DLRNLCLFSY | 856 | 10 | 16 | 25 | 7037 |
| ENV | LLNGSLAEEEV | 307 | 11 | 16 | 25 | 7038 |
| ENV | ELDKWASLWNW | 757 | 11 | 16 | 25 | 7039 |
| ENV | RLVSGFLALAW | 844 | 11 | 16 | 25 | 7040 |
| ENV | AIAVAEGTDRI | 926 | 11 | 16 | 25 | 7041 |
| ENV | VQREKRAV | 589 | 8 | 17 | 27 | 7042 |
| ENV | IINMWQEV | 492 | 8 | 17 | 27 | 7043 |
| ENV | KLICTTNV | 687 | 8 | 17 | 27 | 7044 |
| ENV | SLWNWFDI | 763 | 8 | 17 | 27 | 7045 |
| ENV | DLRNLCLF | 856 | 8 | 17 | 27 | 7046 |
| ENV | QIINMWQEV | 491 | 9 | 17 | 27 | 7047 |
| ENV | LICTTNVPW | 688 | 9 | 17 | 27 | 7048 |
| ENV | RPNNNTRKSI | 347 | 10 | 17 | 27 | 7049 |
| ENV | KQIINMWQEV | 490 | 10 | 17 | 27 | 7050 |
| ENV | EIFRPGGGDM | 544 | 10 | 17 | 27 | 7051 |
| ENV | KLICTTNVPW | 687 | 10 | 17 | 27 | 7052 |
| ENV | RIVFAVLSIV | 791 | 10 | 17 | 27 | 7053 |
| ENV | GVAPTKAKRRV | 573 | 11 | 17 | 27 | 7054 |
| ENV | WQEVGKAM | 496 | 8 | 18 | 28 | 7055 |
| ENV | GLRIIFAV | 789 | 8 | 18 | 28 | 7056 |
| ENV | WQEVGKAMY | 496 | 9 | 18 | 28 | 7057 |
| ENV | ELDKWASLW | 757 | 9 | 18 | 28 | 7058 |
| ENV | IVFAVLSIV | 792 | 9 | 18 | 28 | 7059 |
| ENV | YLRDQQLLGI | 672 | 10 | 18 | 28 | 7060 |
| ENV | LPCRIKQIINM | 485 | 11 | 18 | 28 | 7061 |
| ENV | EVGKAMYAPPI | 498 | 11 | 18 | 28 | 7062 |
| ENV | YLRDQQLLGIW | 672 | 11 | 18 | 28 | 7063 |
| ENV | LLELDKWASLW | 755 | 11 | 18 | 28 | 7064 |
| ENV | CLFSYHRLRDF | 861 | 11 | 18 | 28 | 7065 |
| ENV | KLICTTAV | 687 | 8 | 19 | 30 | 7066 |
| ENV | LICTTAVPW | 688 | 9 | 19 | 30 | 7067 |
| ENV | RIVFAVLSI | 791 | 9 | 19 | 30 | 7068 |
| ENV | KLICTTAVPW | 687 | 10 | 19 | 30 | 7069 |
| ENV | GLRIVFAVLSI | 789 | 11 | 19 | 30 | 7070 |
| ENV | ELLELDKW | 754 | 8 | 20 | 31 | 7071 |
| ENV | IVFAVLSI | 792 | 8 | 20 | 31 | 7072 |
| ENV | LPCRIKQII | 485 | 9 | 20 | 31 | 7073 |
| ENV | NMVEQMIIEDI | 112 | 10 | 20 | 31 | 7074 |
| ENV | NMVEQMIIEDII | 112 | 11 | 20 | 31 | 7075 |
| ENV | DLLALDKW | 754 | 8 | 21 | 33 | 7076 |
| ENV | DLEITTIISF | 428 | 9 | 21 | 33 | 7077 |
| ENV | VPTDPNPQEV | 88 | 10 | 21 | 33 | 7078 |
| ENV | LIGLRIVFAV | 781 | 10 | 21 | 33 | 7079 |
| ENV | CVPTDPNPQEV | 87 | 11 | 21 | 33 | 7080 |
| ENV | GLIGLRIVFAV | 786 | 11 | 21 | 33 | 7081 |
| ENV | APTKAKRRV | 575 | 9 | 22 | 34 | 7082 |
| ENV | APTKAKRRVV | 575 | 10 | 22 | 34 | 7083 |
| ENV | IVELLGRRGW | 879 | 10 | 22 | 34 | 7084 |
| ENV | PVWKEATTTLF | 54 | 11 | 22 | 34 | 7085 |
| ENV | EQMIIEDIISLW | 115 | 11 | 22 | 34 | 7086 |
| ENV | TVQCTIIGIRPV | 290 | 11 | 22 | 34 | 7087 |
| ENV | RIVELLGRRGW | 878 | 11 | 22 | 34 | 7088 |
| ENV | ELLGRRGW | 881 | 8 | 23 | 37 | 7089 |
| ENV | MVEQMIIEDI | 113 | 9 | 23 | 36 | 7090 |
| ENV | VVKIEPLGV | 566 | 9 | 23 | 36 | 7091 |
| ENV | MVEQMIIEDII | 113 | 10 | 23 | 36 | 7092 |
| ENV | KVVKIEPLGV | 565 | 10 | 23 | 36 | 7093 |
| ENV | EQMHEDII | 115 | 8 | 24 | 38 | 7094 |
| ENV | VVEREKRAV | 588 | 9 | 25 | 39 | 7095 |
| ENV | VPTDPNPQEI | 88 | 10 | 25 | 39 | 7096 |
| ENV | VQCTHGIRPV | 292 | 10 | 25 | 39 | 7097 |
| ENV | RVVEREKRAV | 587 | 10 | 25 | 39 | 7098 |
| ENV | QQQNNLLRAI | 636 | 10 | 25 | 39 | 7099 |
| ENV | CVPTDPNPQEI | 87 | 11 | 25 | 39 | 7100 |
| ENV | VQCTHGIRPVV | 292 | 11 | 25 | 39 | 7101 |
| ENV | VQQQNNLLRAI | 635 | 11 | 25 | 39 | 7102 |
| ENV | TLPCRIKQI | 484 | 9 | 26 | 41 | 7103 |
| ENV | QQNNLLRAI | 637 | 9 | 26 | 41 | 7104 |
| ENV | QQSNLLRAI | 637 | 9 | 26 | 41 | 7105 |
| ENV | QQQSNLLRAI | 636 | 10 | 26 | 41 | 7106 |
| ENV | IPIHYCAPAGF | 259 | 11 | 26 | 41 | 7107 |
| ENV | VQQQSNLLRAI | 635 | 11 | 26 | 41 | 7108 |
| ENV | PIIIYCAPAGF | 260 | 10 | 27 | 42 | 7109 |
| ENV | YLKDQQLLGI | 672 | 10 | 27 | 42 | 7110 |
| ENV | YLKDQQLLGIW | 672 | 11 | 27 | 42 | 7111 |
| ENV | KVSFEPIPIHY | 252 | 11 | 28 | 44 | 7112 |
| ENV | TVQCTIIGIKPV | 290 | 11 | 28 | 44 | 7113 |
| ENV | ELYKYKVVKI | 560 | 10 | 29 | 46 | 7114 |
| ENV | LIGLRIVF | 787 | 8 | 29 | 45 | 7115 |
| ENV | GLRIVFAV | 789 | 8 | 29 | 45 | 7116 |
| ENV | GLIGLRIVF | 786 | 9 | 29 | 45 | 7117 |
| ENV | QMHEDIISLW | 116 | 10 | 29 | 45 | 7118 |
| ENV | RIKQIINM | 488 | 8 | 30 | 47 | 7119 |
| ENV | TQACPKVSF | 247 | 9 | 30 | 47 | 7120 |
| ENV | CPKVSFEPI | 250 | 9 | 30 | 47 | 7121 |
| ENV | KVSFEPIPI | 252 | 9 | 30 | 47 | 7122 |
| ENV | RIKQIINMW | 488 | 9 | 30 | 47 | 7123 |
| ENV | NMWKNNMVEQM | 107 | 11 | 30 | 47 | 7124 |
| ENV | CPKVSFEPIPI | 250 | 11 | 30 | 47 | 7125 |
| ENV | IVGGLIGLRIV | 783 | 11 | 30 | 47 | 7126 |
| ENV | LPCRIKQI | 485 | 8 | 31 | 48 | 7127 |
| ENV | AVLSIVNRV | 795 | 9 | 31 | 48 | 7128 |
| ENV | VQCTIIGIKPVV | 292 | 11 | 31 | 48 | 7129 |
| ENV | KIFIMIVGGLI | 778 | 11 | 31 | 48 | 7130 |
| ENV | GLIGLRIV | 786 | 8 | 32 | 50 | 7131 |
| ENV | VQCTIIGIKPV | 292 | 10 | 32 | 50 | 7132 |
| ENV | LQARVLAV | 662 | 8 | 33 | 52 | 7133 |
| ENV | RVLAVERY | 665 | 8 | 33 | 52 | 7134 |
| ENV | QLQARVLAV | 661 | 9 | 33 | 52 | 7135 |
| ENV | KQLQARVLAV | 660 | 10 | 33 | 52 | 7136 |
| ENV | LQARVLAVERY | 662 | 11 | 33 | 52 | 7137 |
| ENV | NLWVTVYYGV | 44 | 10 | 34 | 54 | 7138 |
| ENV | NVTENFNM | 101 | 8 | 34 | 53 | 7139 |
| ENV | NMWKNNMV | 107 | 8 | 34 | 53 | 7140 |
| ENV | HLLQLTVW | 650 | 8 | 34 | 53 | 7141 |
| ENV | NVTENFNMW | 101 | 9 | 34 | 53 | 7142 |
| ENV | QQHLLQLTV | 648 | 9 | 34 | 53 | 7143 |
| ENV | LLQLTVWGI | 651 | 9 | 34 | 53 | 7144 |
| ENV | AQQHLLQLTV | 647 | 10 | 34 | 53 | 7145 |
| ENV | QQHLLQLTVW | 648 | 10 | 34 | 53 | 7146 |
| ENV | IILLQLTVWGI | 650 | 10 | 34 | 53 | 7147 |
| ENV | AQQHLLQLTVW | 647 | 11 | 34 | 53 | 7148 |
| ENV | NLWVTVYY | 44 | 8 | 35 | 56 | 7149 |
| ENV | IMIVGGLI | 781 | 8 | 35 | 56 | 7150 |
| ENV | FIMIVGGLI | 780 | 9 | 35 | 55 | 7151 |
| ENV | DLRSLCLFSY | 856 | 10 | 35 | 55 | 7152 |
| ENV | VQARQLLSGI | 625 | 10 | 36 | 56 | 7153 |
| ENV | SIVNRVRQGY | 798 | 10 | 36 | 56 | 7154 |
| ENV | TMGAASITLTV | 615 | 11 | 36 | 56 | 7155 |
| ENV | TVQARQLLSGI | 624 | 11 | 36 | 56 | 7156 |
| ENV | VQARQLLSGIV | 625 | 11 | 36 | 56 | 7157 |
| ENV | MIVGGLIGLRI | 782 | 11 | 36 | 56 | 7158 |
| ENV | DMRDNWRSELY | 552 | 11 | 37 | 58 | 7159 |
| ENV | VLSIVNRV | 796 | 8 | 38 | 59 | 7160 |
| ENV | DLRSLCLF | 856 | 8 | 38 | 59 | 7161 |
| ENV | IVNRVRQGY | 799 | 9 | 38 | 59 | 7162 |
| ENV | RPGGGDMRDNW | 547 | 11 | 38 | 59 | 7163 |
| ENV | YIKIFIMIV | 776 | 9 | 39 | 61 | 7164 |
| ENV | GIKQLQARV | 658 | 9 | 40 | 63 | 7165 |
| ENV | TLFCASDAKAY | 64 | 11 | 40 | 63 | 7166 |
| ENV | IVGGLIGLRI | 783 | 10 | 42 | 66 | 7167 |
| ENV | YIKIFIMI | 776 | 8 | 43 | 67 | 7168 |
| ENV | WLWYIKIFIM | 773 | 10 | 43 | 67 | 7169 |
| ENV | WLWYIKIFIMI | 773 | 11 | 43 | 67 | 7170 |
| ENV | LQLTVWGI | 652 | 8 | 44 | 69 | 7171 |
| ENV | SLWDQSLKPCV | 123 | 11 | 47 | 75 | 7172 |
| ENV | RVRQGYSPLSF | 802 | 11 | 47 | 73 | 7173 |
| ENV | RQGYSPLSF | 804 | 9 | 48 | 75 | 7174 |
| ENV | GIWGCSGKLI | 680 | 10 | 48 | 75 | 7175 |
| ENV | RQLLSGIV | 628 | 8 | 49 | 77 | 7176 |
| ENV | NVWATIIACV | 80 | 9 | 49 | 77 | 7177 |
| ENV | WLWYIKIFI | 773 | 9 | 49 | 77 | 7178 |
| ENV | DQSLKPCV | 126 | 8 | 50 | 78 | 7179 |
| ENV | WLWYIKIF | 773 | 8 | 50 | 78 | 7180 |
| ENV | TVQCTIIGI | 290 | 8 | 51 | 80 | 7181 |
| ENV | DQQLLGIW | 675 | 8 | 51 | 80 | 7182 |
| ENV | NVSTVQCTIIGI | 287 | 11 | 51 | 80 | 7183 |
| ENV | KPCVKLTPLCV | 130 | 11 | 54 | 84 | 7184 |
| ENV | TVYYGVPV | 48 | 8 | 55 | 86 | 7185 |
| ENV | TVYYGVPVW | 48 | 9 | 55 | 86 | 7186 |
| ENV | CVKLTPLCV | 132 | 9 | 55 | 86 | 7187 |
| ENV | FLGAAGSTM | 608 | 9 | 55 | 86 | 7188 |
| ENV | WVTVYYGVPV | 46 | 10 | 55 | 86 | 7189 |
| ENV | WVTVYYGVPVW | 46 | 11 | 55 | 86 | 7190 |
| ENV | ELYKYKVV | 560 | 8 | 56 | 89 | 7191 |
| ENV | WVTVYYGV | 46 | 8 | 58 | 91 | 7192 |
| GAG | PPPESFRF | 510 | 8 | 01 | 33 | 7193 |
| GAG | EPIDKELY | 537 | 8 | 01 | 25 | 7194 |
| GAG | APPPESFRF | 509 | 9 | 01 | 33 | 7195 |
| GAG | KQEPIDKELY | 535 | 10 | 01 | 25 | 7196 |
| GAG | KQETIDKDLY | 535 | 10 | 01 | 25 | 7197 |
| GAG | EPLTALRSLF | 547 | 10 | 01 | 33 | 7198 |
| GAG | PPLASLKSLF | 547 | 10 | 01 | 33 | 7199 |
| GAG | PPLISLKSLF | 547 | 10 | 01 | 33 | 7200 |
| GAG | EPTAPPAESF | 506 | 10 | 01 | 50 | 7201 |
| GAG | EPTAPPPESF | 506 | 10 | 01 | 50 | 7202 |
| GAG | PPAESFRF | 510 | 8 | 02 | 67 | 7203 |
| GAG | APPAESFRF | 509 | 9 | 02 | 67 | 7204 |
| GAG | PPLASLKSLF | 546 | 10 | 04 | 24 | 7205 |
| GAG | YPLASLRSLF | 545 | 10 | 07 | 15 | 7206 |
| GAG | YPLASLKSLF | 545 | 10 | 08 | 17 | 7207 |
| GAG | NIMMQRGNF | 407 | 9 | 10 | 17 | 7208 |
| GAG | TPSQKQEPI | 527 | 9 | 10 | 17 | 7209 |
| GAG | NPPIPVGDI | 277 | 9 | 10 | 16 | 7210 |
| GAG | NPPIPVGDIY | 277 | 10 | 10 | 16 | 7211 |
| GAG | QIGWMTSNPPI | 267 | 11 | 10 | 16 | 7212 |
| GAG | KLDKWEKI | 12 | 8 | 10 | 16 | 7213 |
| GAG | GPVAPGQM | 242 | 8 | 10 | 16 | 7214 |
| GAG | PPIPVGDI | 278 | 8 | 10 | 16 | 7215 |
| GAG | PPAESFGF | 498 | 8 | 10 | 16 | 7216 |
| GAG | PPIPVGDIY | 278 | 9 | 10 | 16 | 7217 |
| GAG | APPAESFGF | 497 | 9 | 10 | 16 | 7218 |
| GAG | ALSPRTLNAW | 167 | 10 | 10 | 16 | 7219 |
| GAG | ALSPRTLNAWV | 167 | 11 | 10 | 16 | 7220 |
| GAG | IPVGDIYKRWI | 280 | 11 | 10 | 16 | 7221 |
| GAG | VQNANPDCKSI | 347 | 11 | 10 | 16 | 7222 |
| GAG | PIPVGDIY | 279 | 8 | 11 | 17 | 7223 |
| GAG | SQEVKNWM | 334 | 8 | 11 | 17 | 7224 |
| GAG | IMMQKSNF | 408 | 8 | 11 | 17 | 7225 |
| GAG | PQDLNMMLNI | 202 | 10 | 11 | 17 | 7226 |
| GAG | IPVGDIYKRW | 280 | 10 | 11 | 17 | 7227 |
| GAG | EQASQEVKNW | 331 | 10 | 11 | 17 | 7228 |
| GAG | TPQDLNMMLNI | 201 | 11 | 11 | 17 | 7229 |
| GAG | PQDLNMMLNIV | 202 | 11 | 11 | 17 | 7230 |
| GAG | IVGGIIQAAMQM | 211 | 11 | 11 | 17 | 7231 |
| GAG | TLRAEQATQDV | 327 | 11 | 11 | 17 | 7232 |
| GAG | EQASQEVKNWM | 331 | 11 | 11 | 17 | 7233 |
| GAG | WPSSKGRPGNF | 474 | 11 | 11 | 17 | 7234 |
| GAG | EPIDKELY | 533 | 8 | 12 | 19 | 7235 |
| GAG | KQEPIDKELY | 531 | 10 | 12 | 19 | 7236 |
| GAG | TPQDLNMM | 201 | 8 | 12 | 19 | 7237 |
| GAG | DLNMMLNI | 204 | 8 | 12 | 19 | 7238 |
| GAG | TLQEQIAW | 263 | 8 | 12 | 19 | 7239 |
| GAG | TLYCVIIQKI | 86 | 9 | 12 | 19 | 7240 |
| GAG | DLNMMLNIV | 204 | 9 | 12 | 19 | 7241 |
| GAG | IVGGHQAAM | 211 | 9 | 12 | 19 | 7242 |
| GAG | TLQEQIAWM | 263 | 9 | 12 | 19 | 7243 |
| GAG | PLTSLKSLF | 548 | 9 | 12 | 19 | 7244 |
| GAG | PLTSLRSLF | 548 | 9 | 12 | 19 | 7245 |
| GAG | NIVGGHQAAM | 210 | 10 | 12 | 19 | 7246 |
| GAG | TLRAEQASQEV | 327 | 11 | 12 | 19 | 7247 |
| GAG | TIMMQRGNF | 407 | 9 | 13 | 22 | 7248 |
| GAG | SPTSILDI | 302 | 8 | 13 | 20 | 7249 |
| GAG | RMYSPTSILDI | 299 | 11 | 13 | 20 | 7250 |
| GAG | LQEQIAWM | 264 | 8 | 14 | 22 | 7251 |
| GAG | RMYSPTSI | 299 | 8 | 14 | 22 | 7252 |
| GAG | VQNAQGQMV | 156 | 9 | 14 | 22 | 7253 |
| GAG | IVQNAQGQMV | 155 | 10 | 14 | 22 | 7254 |
| GAG | RVHPVHAGPI | 235 | 10 | 14 | 22 | 7255 |
| GAG | IVRMYSPTSI | 297 | 10 | 14 | 22 | 7256 |
| GAG | PIVQNAQGQMV | 154 | 11 | 14 | 22 | 7257 |
| GAG | KIVRMYSPTSI | 296 | 11 | 14 | 22 | 7258 |
| GAG | WPSNKGRPGNF | 474 | 11 | 14 | 22 | 7259 |
| GAG | KVSQNYPI | 148 | 8 | 15 | 27 | 7260 |
| GAG | KVSQNYPIV | 148 | 9 | 15 | 27 | 7261 |
| GAG | TQDVKNWM | 334 | 8 | 15 | 23 | 7262 |
| GAG | PPEESFRF | 498 | 8 | 15 | 23 | 7263 |
| GAG | ELRSLYNTV | 76 | 9 | 15 | 23 | 7264 |
| GAG | TLYCVIIQRI | 86 | 9 | 15 | 23 | 7265 |
| GAG | APPEESFRF | 497 | 9 | 15 | 23 | 7266 |
| GAG | PLASLKSLF | 548 | 9 | 15 | 23 | 7267 |
| GAG | VLSGGKLDAW | 7 | 10 | 15 | 23 | 7268 |
| GAG | SLFNTVATLY | 79 | 10 | 15 | 23 | 7269 |
| GAG | LQGQMVIIQAI | 159 | 10 | 15 | 23 | 7270 |
| GAG | EQATQDVKNW | 331 | 10 | 15 | 23 | 7271 |
| GAG | EPTAPPEESF | 494 | 10 | 15 | 23 | 7272 |
| GAG | SVLSGGKLDAW | 6 | 11 | 15 | 23 | 7273 |
| GAG | NLQGQMVIIQAI | 158 | 11 | 15 | 23 | 7274 |
| GAG | EQATQDVKNWM | 331 | 11 | 15 | 23 | 7275 |
| GAG | WMTSNPPI | 270 | 8 | 16 | 25 | 7276 |
| GAG | GPAATLEEM | 362 | 9 | 16 | 25 | 7277 |
| GAG | WMTSNPPIPV | 270 | 10 | 16 | 25 | 7278 |
| GAG | GPAATLEEMM | 362 | 10 | 16 | 25 | 7279 |
| GAG | LLETSEGCRQI | 52 | 11 | 16 | 25 | 7280 |
| GAG | ALGPAATLEEM | 360 | 11 | 16 | 25 | 7281 |
| GAG | GPIPPGQM | 242 | 8 | 17 | 27 | 7282 |
| GAG | DIYKRWII | 284 | 8 | 17 | 27 | 7283 |
| GAG | PVGDIYKRWI | 281 | 10 | 17 | 27 | 7284 |
| GAG | PVGDIYKRWII | 281 | 11 | 17 | 27 | 7285 |
| GAG | ALGPGATLEEM | 360 | 11 | 17 | 27 | 7286 |
| GAG | QIGWMTNNPPI | 267 | 11 | 18 | 29 | 7287 |
| GAG | KLDAWEKI | 12 | 8 | 18 | 28 | 7288 |
| GAG | TQEVKNWM | 334 | 8 | 18 | 28 | 7289 |
| GAG | PVGDIYKRW | 281 | 9 | 18 | 28 | 7290 |
| GAG | GPGATLEEM | 362 | 9 | 18 | 28 | 7291 |
| GAG | EQATQEVKNW | 331 | 10 | 18 | 28 | 7292 |
| GAG | GPGATLEEMM | 362 | 10 | 18 | 28 | 7293 |
| GAG | EQATQEVKNWM | 331 | 11 | 18 | 28 | 7294 |
| GAG | GPIAPGQM | 242 | 8 | 19 | 30 | 7295 |
| GAG | GPSHKARV | 379 | 8 | 19 | 30 | 7296 |
| GAG | DIKQGPKEPF | 308 | 10 | 19 | 30 | 7297 |
| GAG | IVWASRELERF | 35 | 11 | 19 | 30 | 7298 |
| GAG | GVGGPSHKARV | 376 | 11 | 19 | 30 | 7299 |
| GAG | WMTNNPPI | 270 | 8 | 20 | 31 | 7300 |
| GAG | WMTNNPPIPV | 270 | 10 | 20 | 31 | 7301 |
| GAG | EPTAPPAESF | 494 | 10 | 20 | 31 | 7302 |
| GAG | YPIVQNAQGQM | 153 | 11 | 20 | 31 | 7303 |
| GAG | VIEEKAFSPEV | 179 | 11 | 20 | 31 | 7304 |
| GAG | VQNAQGQM | 156 | 8 | 21 | 33 | 7305 |
| GAG | KQGPKEPF | 310 | 8 | 21 | 33 | 7306 |
| GAG | IVQNAQGQM | 155 | 9 | 21 | 33 | 7307 |
| GAG | PIVQNAQGQM | 154 | 10 | 21 | 33 | 7308 |
| GAG | KQGPKEPFRDY | 310 | 11 | 21 | 33 | 7309 |
| GAG | SQVSQNYPI | 146 | 9 | 22 | 44 | 7310 |
| GAG | SQVSQNYPIV | 146 | 10 | 22 | 44 | 7311 |
| GAG | WMTDTLLV | 340 | 8 | 22 | 34 | 7312 |
| GAG | SLYNTVATLY | 79 | 10 | 22 | 34 | 7313 |
| GAG | RLIIPVHAGPI | 235 | 10 | 22 | 34 | 7314 |
| GAG | WPSHKGRPGNF | 474 | 11 | 23 | 36 | 7315 |
| GAG | KVIEEKAF | 178 | 8 | 24 | 38 | 7316 |
| GAG | WVKVIEEKAF | 176 | 10 | 24 | 38 | 7317 |
| GAG | TLRAEQATQEV | 327 | 11 | 24 | 38 | 7318 |
| GAG | LVWASRELERF | 35 | 11 | 25 | 39 | 7319 |
| GAG | MQMLKETI | 219 | 8 | 26 | 41 | 7320 |
| GAG | AMQMLKETI | 218 | 9 | 26 | 41 | 7321 |
| GAG | QVSQNYPI | 148 | 8 | 27 | 48 | 7322 |
| GAG | QVSQNYPIV | 148 | 9 | 27 | 48 | 7323 |
| GAG | TLQEQIGW | 263 | 8 | 27 | 42 | 7324 |
| GAG | IMMQRGNF | 408 | 8 | 27 | 42 | 7325 |
| GAG | TLQEQIGWM | 263 | 9 | 27 | 42 | 7326 |
| GAG | GQMVIIQAI | 161 | 8 | 28 | 44 | 7327 |
| GAG | KVVEEKAF | 178 | 8 | 28 | 44 | 7328 |
| GAG | WVKVVEEKAF | 176 | 10 | 28 | 44 | 7329 |
| GAG | VVEEKAFSPEV | 179 | 11 | 28 | 44 | 7330 |
| GAG | EPFRDYVDRFY | 315 | 11 | 28 | 44 | 7331 |
| GAG | VQNLQGQM | 156 | 8 | 29 | 45 | 7332 |
| GAG | LQEQIGWM | 264 | 8 | 29 | 45 | 7333 |
| GAG | IVQNLQGQM | 155 | 9 | 29 | 45 | 7334 |
| GAG | VQNLQGQMV | 156 | 9 | 29 | 45 | 7335 |
| GAG | PIVQNLQGQM | 154 | 10 | 29 | 45 | 7336 |
| GAG | IVQNLQGQMV | 155 | 10 | 29 | 45 | 7337 |
| GAG | AISPRTLNAW | 167 | 10 | 29 | 45 | 7338 |
| GAG | YPIVQNLQGQM | 153 | 11 | 29 | 45 | 7339 |
| GAG | PIVQNLQGQMV | 154 | 11 | 29 | 45 | 7340 |
| GAG | AISPRTLNAWV | 167 | 11 | 29 | 45 | 7341 |
| GAG | TLNAWVKVI | 172 | 9 | 30 | 47 | 7342 |
| GAG | TLNAWVKVV | 172 | 9 | 31 | 48 | 7343 |
| GAG | MQMLKDTI | 219 | 8 | 33 | 52 | 7344 |
| GAG | AMQMLKDTI | 218 | 9 | 33 | 52 | 7345 |
| GAG | VLAEAMSQV | 386 | 9 | 33 | 52 | 7346 |
| GAG | RVLAEAMSQV | 385 | 10 | 33 | 52 | 7347 |
| GAG | NPPIPVGEI | 277 | 9 | 34 | 54 | 7348 |
| GAG | NPPIPVGEIY | 277 | 10 | 34 | 54 | 7349 |
| GAG | RLRPGGKKKY | 20 | 10 | 34 | 53 | 7350 |
| GAG | IPVGEIYKRW | 280 | 10 | 34 | 53 | 7351 |
| GAG | PIPVGEIYKRW | 279 | 11 | 34 | 53 | 7352 |
| GAG | IPVGEIYKRWI | 280 | 11 | 34 | 53 | 7353 |
| GAG | RPGGKKKY | 22 | 8 | 35 | 55 | 7354 |
| GAG | PPIPVGEI | 278 | 8 | 35 | 55 | 7355 |
| GAG | PIPVGEIY | 279 | 8 | 35 | 55 | 7356 |
| GAG | PPIPVGEIY | 278 | 9 | 35 | 55 | 7357 |
| GAG | EPFRDYVDRFF | 315 | 11 | 35 | 55 | 7358 |
| GAG | GPGHKARV | 379 | 8 | 36 | 56 | 7359 |
| GAG | GVGGPGIIKARV | 376 | 11 | 36 | 56 | 7360 |
| GAG | WMTETLLV | 340 | 8 | 37 | 58 | 7361 |
| GAG | HPVHAGPI | 237 | 8 | 38 | 59 | 7362 |
| GAG | RMYSPVSILDI | 299 | 11 | 38 | 59 | 7363 |
| GAG | EIYKRWII | 284 | 8 | 39 | 61 | 7364 |
| GAG | PVGEIYKRWII | 281 | 11 | 39 | 61 | 7365 |
| GAG | KIVRMYSPVSI | 296 | 11 | 39 | 61 | 7366 |
| GAG | RMYSPVSI | 299 | 8 | 40 | 63 | 7367 |
| GAG | SPYSILDI | 302 | 8 | 40 | 63 | 7368 |
| GAG | PVGEIYKRW | 281 | 9 | 40 | 63 | 7369 |
| GAG | PVGEIYKRWI | 281 | 10 | 40 | 63 | 7370 |
| GAG | IVRMYSPVSI | 297 | 10 | 40 | 63 | 7371 |
| GAG | TVATLYCV | 83 | 8 | 41 | 64 | 7372 |
| GAG | KIVRMYSPV | 296 | 9 | 41 | 64 | 7373 |
| GAG | DIRQGPKEPF | 308 | 10 | 41 | 64 | 7374 |
| GAG | PQDLNTMLNTV | 202 | 11 | 41 | 64 | 7375 |
| GAG | TPQDLNTM | 201 | 8 | 42 | 66 | 7376 |
| GAG | IVRMYSPV | 297 | 8 | 42 | 66 | 7377 |
| GAG | RQGPKEPF | 310 | 8 | 42 | 66 | 7378 |
| GAG | DLNTMLNTV | 204 | 9 | 42 | 66 | 7379 |
| GAG | RQGPKEPFRDY | 310 | 11 | 42 | 66 | 7380 |
| GAG | QMREPRGSDI | 248 | 10 | 44 | 69 | 7381 |
| GAG | GQMREPRGSDI | 247 | 11 | 44 | 69 | 7382 |
| GAG | VQNANPDCKTI | 347 | 11 | 45 | 70 | 7383 |
| GAG | TVGGHQAAM | 211 | 9 | 47 | 73 | 7384 |
| GAG | TVGGHQAAMQM | 211 | 11 | 47 | 73 | 7385 |
| GAG | TINEEAAEW | 225 | 9 | 53 | 83 | 7386 |
| GAG | SPEVIPMF | 186 | 8 | 55 | 86 | 7387 |
| GAG | APRKKGCW | 440 | 8 | 55 | 86 | 7388 |
| GAG | SPRTLNAWVKV | 169 | 11 | 55 | 86 | 7389 |
| GAG | RQANFLGKI | 465 | 9 | 56 | 88 | 7390 |
| GAG | RQANFLGKIW | 465 | 10 | 56 | 88 | 7391 |
| GAG | IILGLNKIVRM | 290 | 11 | 56 | 88 | 7392 |
| GAG | SPRTLNAW | 169 | 8 | 57 | 89 | 7393 |
| GAG | IILGLNKI | 290 | 8 | 57 | 89 | 7394 |
| GAG | SPRTLNAWV | 169 | 9 | 57 | 89 | 7395 |
| GAG | WIILGLNKI | 289 | 9 | 57 | 89 | 7396 |
| GAG | IILGLNKIV | 290 | 9 | 57 | 89 | 7397 |
| GAG | WIILGLNKIV | 289 | 10 | 57 | 89 | 7398 |
| GAG | ILGLNKIVRM | 291 | 10 | 57 | 89 | 7399 |
| GAG | ILGLNKIVRMY | 291 | 11 | 57 | 89 | 7400 |
| GAG | ILGLNKIV | 291 | 8 | 58 | 91 | 7401 |
| GAG | EMMTACQGV | 369 | 9 | 59 | 92 | 7402 |
| GAG | GLNKIVRM | 293 | 8 | 60 | 94 | 7403 |
| GAG | MMTACQGV | 370 | 8 | 60 | 94 | 7404 |
| GAG | GLNKIVRMY | 293 | 9 | 60 | 94 | 7405 |
| GAG | TLNAWVKV | 172 | 8 | 61 | 95 | 7406 |
| GAG | GPKEPFRDY | 312 | 9 | 63 | 98 | 7407 |
| GAG | GPKEPFRDYV | 312 | 10 | 63 | 98 | 7408 |
| GAG | EPFRDYVDRF | 315 | 10 | 63 | 98 | 7409 |
| NEF | APTAAKGV | 34 | 8 | 01 | 33 | 7410 |
| NEF | APTAAKGVGAV | 34 | 11 | 01 | 33 | 7411 |
| NEF | KQAEPAAEGV | 32 | 10 | 01 | 17 | 7412 |
| NEF | RQAPTAAKGV | 32 | 10 | 01 | 17 | 7413 |
| NEF | AQAEPAAAGV | 33 | 10 | 01 | 17 | 7414 |
| NEF | EPAADGVGAV | 40 | 10 | 04 | 15 | 7415 |
| NEF | VPLRPMTF | 101 | 8 | 10 | 16 | 7416 |
| NEF | IIPICQIIGM | 259 | 8 | 10 | 16 | 7417 |
| NEF | QVPLRPMTF | 100 | 9 | 10 | 16 | 7418 |
| NEF | PQVPLRPMTF | 99 | 10 | 10 | 16 | 7419 |
| NEF | LLIIPICQHGM | 257 | 10 | 10 | 16 | 7420 |
| NEF | IIMARELHPEY | 320 | 10 | 10 | 16 | 7421 |
| NEF | RPQVPLRPMTF | 98 | 11 | 10 | 16 | 7422 |
| NEF | CLLHPMSQIIGM | 256 | 11 | 10 | 16 | 7423 |
| NEF | IIMARELIIPEYY | 320 | 11 | 10 | 16 | 7424 |
| NEF | WQNYTPGPGV | 204 | 10 | 11 | 17 | 7425 |
| NEF | VPVDPREV | 230 | 8 | 11 | 17 | 7426 |
| NEF | LVPVDPREV | 229 | 9 | 11 | 17 | 7427 |
| NEF | KLVPVDPREV | 228 | 10 | 11 | 17 | 7428 |
| NEF | PMTYKGAF | 105 | 8 | 12 | 19 | 7429 |
| NEF | HPMSQIIGM | 259 | 8 | 12 | 19 | 7430 |
| NEF | RPMTYKGAF | 104 | 9 | 12 | 19 | 7431 |
| NEF | LLIIPMSQIIGM | 257 | 10 | 12 | 19 | 7432 |
| NEF | PLRPMTYKGAF | 102 | 11 | 12 | 19 | 7433 |
| NEF | SQKRQDILDLW | 177 | 11 | 12 | 19 | 7434 |
| NEF | WVYHTQGF | 191 | 8 | 13 | 20 | 7435 |
| NEF | TPGPGTRF | 208 | 8 | 13 | 20 | 7436 |
| NEF | GIRYPLTF | 213 | 8 | 13 | 20 | 7437 |
| NEF | WVYHTQGFF | 191 | 9 | 13 | 20 | 7438 |
| NEF | DLWVYIITQGF | 188 | 10 | 13 | 20 | 7439 |
| NEF | GPGIRYPLTF | 210 | 10 | 13 | 20 | 7440 |
| NEF | GPGTRFPLTF | 210 | 10 | 13 | 20 | 7441 |
| NEF | GIRYPLTFGW | 213 | 10 | 13 | 20 | 7442 |
| NEF | DLWVYHTQGFF | 188 | 11 | 13 | 20 | 7443 |
| NEF | DLEKHGAI | 57 | 8 | 14 | 22 | 7444 |
| NEF | WLEAQEEEEV | 79 | 10 | 15 | 24 | 7445 |
| NEF | AQEEEEVGF | 83 | 9 | 17 | 27 | 7446 |
| NEF | AQEEEEVGFPV | 83 | 11 | 17 | 27 | 7447 |
| NEF | TPGPGIRY | 208 | 8 | 17 | 27 | 7448 |
| NEF | FPLTFGWCF | 217 | 9 | 17 | 27 | 7449 |
| NEF | TQGFFPDWQNY | 195 | 11 | 17 | 27 | 7450 |
| NEF | WQNYTPGPGI | 204 | 10 | 18 | 29 | 7451 |
| NEF | LIYSKKRQEI | 174 | 10 | 18 | 28 | 7452 |
| NEF | GLIYSKKRQEI | 173 | 11 | 18 | 28 | 7453 |
| NEF | DILDLWVY | 185 | 8 | 20 | 31 | 7454 |
| NEF | RQDILDLWV | 182 | 9 | 20 | 31 | 7455 |
| NEF | RQDILDLWVY | 182 | 10 | 20 | 31 | 7456 |
| NEF | WVYHTQGY | 191 | 8 | 21 | 33 | 7457 |
| NEF | WVYHTQGYF | 191 | 9 | 21 | 33 | 7458 |
| NEF | DLWVYIITQGY | 188 | 10 | 21 | 33 | 7459 |
| NEF | DLWVYHTQGYF | 188 | 11 | 21 | 33 | 7460 |
| NEF | TQGFFPDW | 195 | 8 | 22 | 34 | 7461 |
| NEF | YPLTFGWCF | 217 | 9 | 24 | 38 | 7462 |
| NEF | RQDILDLW | 182 | 8 | 25 | 39 | 7463 |
| NEF | RQEILDLWVY | 182 | 10 | 32 | 50 | 7464 |
| NEF | EILDLWVY | 185 | 8 | 33 | 52 | 7465 |
| NEF | RQEILDLWV | 182 | 9 | 35 | 55 | 7466 |
| NEF | PLTFGWCFKLV | 219 | 11 | 35 | 55 | 7467 |
| NEF | RPQVPLRPMTY | 98 | 11 | 36 | 56 | 7468 |
| NEF | TQGYFPDWQNY | 195 | 11 | 36 | 56 | 7469 |
| NEF | RQEILDLW | 182 | 8 | 37 | 58 | 7470 |
| NEF | TQGYFPDW | 195 | 8 | 37 | 58 | 7471 |
| NEF | EVGFPVRPQV | 91 | 10 | 40 | 63 | 7472 |
| NEF | PLTFGWCF | 219 | 8 | 43 | 67 | 7473 |
| NEF | PQVPLRPMTY | 99 | 10 | 45 | 70 | 7474 |
| NEF | VPLRPMTY | 101 | 8 | 46 | 73 | 7475 |
| NEF | QVPLRPMTY | 100 | 9 | 46 | 72 | 7476 |
| NEF | RPQVPLRPM | 98 | 9 | 47 | 73 | 7477 |
| NEF | PVRPQVPLRPM | 95 | 11 | 47 | 73 | 7478 |
| NEF | PQVPLRPM | 99 | 8 | 56 | 88 | 7479 |
| POL | SPTSRELQV | 35 | 9 | 01 | 33 | 7480 |
| POL | AISLSLPQI | 80 | 9 | 01 | 33 | 7481 |
| POL | SPSSRELQV | 38 | 9 | 01 | 50 | 7482 |
| POL | GPERALSV | 70 | 8 | 01 | 20 | 7483 |
| POL | VPTFNFPQI | 79 | 9 | 01 | 17 | 7484 |
| POL | EPGEDRELSV | 69 | 10 | 01 | 17 | 7485 |
| POL | GQRQGTVSLSF | 69 | 11 | 01 | 17 | 7486 |
| POL | PQGEAREF | 9 | 8 | 10 | 16 | 7487 |
| POL | FPQGEAREF | 8 | 9 | 10 | 16 | 7488 |
| POL | LIEICGHKAI | 150 | 10 | 10 | 16 | 7489 |
| POL | AVQKIATESI | 563 | 10 | 10 | 16 | 7490 |
| POL | MLTQLGCTLNF | 176 | 11 | 10 | 16 | 7491 |
| POL | AVQKIATESIV | 563 | 11 | 10 | 16 | 7492 |
| POL | AVKAACWWAGI | 877 | 11 | 10 | 16 | 7493 |
| POL | IQTKELQKQII | 960 | 11 | 10 | 16 | 7494 |
| POL | RIGPENPY | 238 | 8 | 11 | 17 | 7495 |
| POL | YQLETEPI | 619 | 8 | 11 | 17 | 7496 |
| POL | AQEDHEKY | 760 | 8 | 11 | 17 | 7497 |
| POL | GIQQEFGI | 886 | 8 | 11 | 17 | 7498 |
| POL | KVVPRRKV | 1011 | 8 | 11 | 17 | 7499 |
| POL | VPRRKVKI | 1013 | 8 | 11 | 17 | 7500 |
| POL | VVPRRKVKI | 1012 | 9 | 11 | 17 | 7501 |
| POL | VPRRKVKII | 1013 | 9 | 11 | 17 | 7502 |
| POL | IIKDYGKQM | 1020 | 9 | 11 | 17 | 7503 |
| POL | GIQQEFGIPY | 886 | 10 | 11 | 17 | 7504 |
| POL | KVVPRRKVKI | 1011 | 10 | 11 | 17 | 7505 |
| POL | VVPRRKVKII | 1012 | 10 | 11 | 17 | 7506 |
| POL | KIIKDYGKQM | 1019 | 10 | 11 | 17 | 7507 |
| POL | KISRIGPENPY | 235 | 11 | 11 | 17 | 7508 |
| POL | IPSTNNETPGI | 321 | 11 | 11 | 17 | 7509 |
| POL | KLWYQLETEPI | 616 | 11 | 11 | 17 | 7510 |
| POL | KVVPRRKVKII | 1011 | 11 | 11 | 17 | 7511 |
| POL | KQIIKIQNF | 967 | 9 | 12 | 19 | 7512 |
| POL | IIKIQNFRV | 969 | 9 | 12 | 19 | 7513 |
| POL | IIKIQNFRVY | 969 | 10 | 12 | 19 | 7514 |
| POL | KQIIKIQNFRV | 967 | 11 | 12 | 19 | 7515 |
| POL | IIKIQNFRVYY | 969 | 11 | 12 | 19 | 7516 |
| POL | RPLVTVKI | 95 | 8 | 12 | 19 | 7517 |
| POL | EINLPGKW | 122 | 8 | 12 | 19 | 7518 |
| POL | QIIKIQNF | 968 | 8 | 12 | 19 | 7519 |
| POL | VIQDNSEI | 1003 | 8 | 12 | 19 | 7520 |
| POL | RQIILLRWGF | 395 | 9 | 12 | 19 | 7521 |
| POL | NQKTELIIAI | 666 | 9 | 12 | 19 | 7522 |
| POL | IIDIIASDI | 952 | 9 | 12 | 19 | 7523 |
| POL | IVDIIATDI | 952 | 9 | 12 | 19 | 7524 |
| POL | VVIQDNSEI | 1002 | 9 | 12 | 19 | 7525 |
| POL | IQDNSEIKV | 1004 | 9 | 12 | 19 | 7526 |
| POL | WQRPLVTVKI | 93 | 10 | 12 | 19 | 7527 |
| POL | RQYDQIPIEI | 144 | 10 | 12 | 19 | 7528 |
| POL | GQDQWTYQIY | 525 | 10 | 12 | 19 | 7529 |
| POL | RMRGAIITNDV | 548 | 10 | 12 | 19 | 7530 |
| POL | NQKTELQAIY | 666 | 10 | 12 | 19 | 7531 |
| POL | RIIDIIASDI | 951 | 10 | 12 | 19 | 7532 |
| POL | RIVDIIATDI | 951 | 10 | 12 | 19 | 7533 |
| POL | QIIKIQNFRV | 968 | 10 | 12 | 19 | 7534 |
| POL | AVVIQDNSEI | 1000 | 10 | 12 | 19 | 7535 |
| POL | VIQDNSEIKV | 1003 | 10 | 12 | 19 | 7536 |
| POL | IQDNSEIKVV | 1004 | 10 | 12 | 19 | 7537 |
| POL | VLEEINLPGKW | 119 | 11 | 12 | 19 | 7538 |
| POL | ELRQHLLRWGF | 393 | 11 | 12 | 19 | 7539 |
| POL | IIPDKWTVQPIV | 424 | 11 | 12 | 19 | 7540 |
| POL | IQKQGQDQWTY | 521 | 11 | 12 | 19 | 7541 |
| POL | LQKQIIKIQNF | 965 | 11 | 12 | 19 | 7542 |
| POL | QIIKIQNFRVY | 968 | 11 | 12 | 19 | 7543 |
| POL | VVIQDNSEIKV | 1002 | 11 | 12 | 19 | 7544 |
| POL | VIQDNSEIKVV | 1003 | 11 | 12 | 19 | 7545 |
| POL | ELQKQIIKI | 964 | 9 | 13 | 21 | 7546 |
| POL | NLKTGKYARM | 540 | 10 | 13 | 21 | 7547 |
| POL | DINLPGKW | 122 | 8 | 13 | 20 | 7548 |
| POL | RQYDQIPI | 144 | 8 | 13 | 20 | 7549 |
| POL | QLPEKDSW | 434 | 8 | 13 | 20 | 7550 |
| POL | VLPEKDSW | 434 | 8 | 13 | 20 | 7551 |
| POL | LQKQIIKI | 965 | 8 | 13 | 20 | 7552 |
| POL | IQLPEKDSW | 433 | 9 | 13 | 20 | 7553 |
| POL | IVLPEKDSW | 433 | 9 | 13 | 20 | 7554 |
| POL | IQKQGQDQW | 521 | 9 | 13 | 20 | 7555 |
| POL | GQDQWTYQI | 525 | 9 | 13 | 20 | 7556 |
| POL | SPTRRELQVW | 29 | 10 | 13 | 20 | 7557 |
| POL | KVRQYDQIPI | 142 | 10 | 13 | 20 | 7558 |
| POL | LIEICGKKAI | 150 | 10 | 13 | 20 | 7559 |
| POL | PIQLPEKDSW | 432 | 10 | 13 | 20 | 7560 |
| POL | PIVLPEKDSW | 432 | 10 | 13 | 20 | 7561 |
| POL | QLPEKDSWTV | 434 | 10 | 13 | 20 | 7562 |
| POL | VLPEKDSWTV | 434 | 10 | 13 | 20 | 7563 |
| POL | EIQKQGQDQW | 520 | 10 | 13 | 20 | 7564 |
| POL | EQAEIILKTAV | 919 | 10 | 13 | 20 | 7565 |
| POL | VLEDINLPGKW | 119 | 11 | 13 | 20 | 7566 |
| POL | ILIEICGKKAI | 149 | 11 | 13 | 20 | 7567 |
| POL | QPIQLPEKDSW | 431 | 11 | 13 | 20 | 7568 |
| POL | QPIVLPEKDSW | 431 | 11 | 13 | 20 | 7569 |
| POL | IQLPEKDSWTV | 433 | 11 | 13 | 20 | 7570 |
| POL | IVLPEKDSWTV | 433 | 11 | 13 | 20 | 7571 |
| POL | KQGQDQWTYQI | 523 | 11 | 13 | 20 | 7572 |
| POL | LIKKEKVYLSW | 717 | 11 | 13 | 20 | 7573 |
| POL | KLAGRWPVKTI | 855 | 11 | 13 | 20 | 7574 |
| POL | RPLVTIKI | 95 | 8 | 14 | 22 | 7575 |
| POL | KQNPDIVI | 362 | 8 | 14 | 22 | 7576 |
| POL | KIATESIV | 566 | 8 | 14 | 22 | 7577 |
| POL | YQLEKDPI | 619 | 8 | 14 | 22 | 7578 |
| POL | SPTRRELQV | 29 | 9 | 14 | 22 | 7579 |
| POL | KQNPDIVIY | 362 | 9 | 14 | 22 | 7580 |
| POL | VQKIATESI | 564 | 9 | 14 | 22 | 7581 |
| POL | KIATESIVI | 566 | 9 | 14 | 22 | 7582 |
| POL | WQRPLVTIKI | 93 | 10 | 14 | 22 | 7583 |
| POL | VQKIATESIV | 564 | 10 | 14 | 22 | 7584 |
| POL | KIATESIVIW | 566 | 10 | 14 | 22 | 7585 |
| POL | TIHTDNGSNF | 864 | 10 | 14 | 22 | 7586 |
| POL | EPFRKQNPDIV | 358 | 11 | 14 | 22 | 7587 |
| POL | KQNPDIVIYQY | 362 | 11 | 14 | 22 | 7588 |
| POL | ELREHLLKWGF | 393 | 11 | 14 | 22 | 7589 |
| POL | VQKIATESIVI | 564 | 11 | 14 | 22 | 7590 |
| POL | KLWYQLEKDPI | 616 | 11 | 14 | 22 | 7591 |
| POL | LVEICTEM | 221 | 8 | 15 | 24 | 7592 |
| POL | KIKALVEI | 217 | 8 | 15 | 23 | 7593 |
| POL | TQLGCTLNF | 178 | 9 | 15 | 23 | 7594 |
| POL | ALVEICTEM | 220 | 9 | 15 | 23 | 7595 |
| POL | ELRQHLLRW | 393 | 9 | 15 | 23 | 7596 |
| POL | IQKQGQGQW | 521 | 9 | 15 | 23 | 7597 |
| POL | KQGQDQWTY | 523 | 9 | 15 | 23 | 7598 |
| POL | IQKETWEAW | 585 | 9 | 15 | 23 | 7599 |
| POL | LVSAGIRKV | 743 | 9 | 15 | 23 | 7600 |
| POL | LPGRWKPKMI | 125 | 10 | 15 | 23 | 7601 |
| POL | EIQKQGQGQW | 520 | 10 | 15 | 23 | 7602 |
| POL | PIQKETWEAW | 584 | 10 | 15 | 23 | 7603 |
| POL | IQKETWEAWW | 585 | 10 | 15 | 23 | 7604 |
| POL | QVDKLVSAGI | 739 | 10 | 15 | 23 | 7605 |
| POL | KLVSAGIRKV | 742 | 10 | 15 | 23 | 7606 |
| POL | TQLGCTLNFPI | 178 | 11 | 15 | 23 | 7607 |
| POL | PLTEEKIKALV | 212 | 11 | 15 | 23 | 7608 |
| POL | IQKQGQGQWTY | 521 | 11 | 15 | 23 | 7609 |
| POL | LPIQKETWEAW | 583 | 11 | 15 | 23 | 7610 |
| POL | PIQKETWEAWW | 584 | 11 | 15 | 23 | 7611 |
| POL | HLALQDSGLEV | 675 | 11 | 15 | 23 | 7612 |
| POL | EQVDKLVSAGI | 738 | 11 | 15 | 23 | 7613 |
| POL | LVSAGIRKVLF | 743 | 11 | 15 | 23 | 7614 |
| POL | QLGCTLNF | 179 | 8 | 16 | 25 | 7615 |
| POL | QLEKEPIV | 620 | 8 | 16 | 25 | 7616 |
| POL | AQEEHERY | 760 | 8 | 16 | 25 | 7617 |
| POL | LPGRWKPKM | 125 | 9 | 16 | 25 | 7618 |
| POL | YQLEKEPIV | 619 | 9 | 16 | 25 | 7619 |
| POL | IQQEFGIPY | 887 | 9 | 16 | 25 | 7620 |
| POL | QLGCTLNFPI | 179 | 10 | 16 | 25 | 7621 |
| POL | EPFRKQNPDI | 358 | 10 | 16 | 25 | 7622 |
| POL | TPKFKLPI | 578 | 8 | 17 | 27 | 7623 |
| POL | NPDIVIYQY | 364 | 9 | 17 | 27 | 7624 |
| POL | ELREIILLKW | 393 | 9 | 17 | 27 | 7625 |
| POL | NPDIVIYQYM | 364 | 10 | 17 | 27 | 7626 |
| POL | MLTQIGCTLNF | 176 | 11 | 17 | 27 | 7627 |
| POL | NLKTGKYAKM | 540 | 10 | 18 | 29 | 7628 |
| POL | SVPLDKDF | 306 | 8 | 18 | 28 | 7629 |
| POL | DIVIYQYM | 366 | 8 | 18 | 28 | 7630 |
| POL | TLWQRPLVTV | 91 | 10 | 18 | 28 | 7631 |
| POL | IIGRNMLTQI | 171 | 10 | 18 | 28 | 7632 |
| POL | VPLDKDFRKY | 307 | 10 | 18 | 28 | 7633 |
| POL | NIIGRNMLTQI | 170 | 11 | 18 | 28 | 7634 |
| POL | SVPLDKDFRKY | 306 | 11 | 18 | 28 | 7635 |
| POL | LLRGTKALTEV | 471 | 11 | 18 | 28 | 7636 |
| POL | ELVNQIIEQLI | 708 | 11 | 18 | 28 | 7637 |
| POL | AMASDFNLPPI | 773 | 11 | 18 | 28 | 7638 |
| POL | PLWKGPAKLLW | 985 | 11 | 18 | 28 | 7639 |
| POL | PLDKDFRKY | 308 | 9 | 19 | 30 | 7640 |
| POL | WQRPLVTV | 93 | 8 | 19 | 30 | 7641 |
| POL | EICGHKAI | 152 | 8 | 19 | 30 | 7642 |
| POL | LVNQIIEQLI | 709 | 10 | 19 | 30 | 7643 |
| POL | LVSQIIEQLI | 709 | 10 | 19 | 30 | 7644 |
| POL | EICGIIKAIGTV | 152 | 11 | 19 | 30 | 7645 |
| POL | ELVSQIIEQLI | 708 | 11 | 19 | 30 | 7646 |
| POL | QQEFGIPY | 888 | 8 | 20 | 32 | 7647 |
| POL | RQYDQILI | 144 | 8 | 20 | 31 | 7648 |
| POL | SQIIEQLI | 711 | 8 | 20 | 31 | 7649 |
| POL | KLPIQKETW | 582 | 9 | 20 | 31 | 7650 |
| POL | KVRQYDQILI | 142 | 10 | 20 | 31 | 7651 |
| POL | RQYDQILIEI | 144 | 10 | 20 | 31 | 7652 |
| POL | DLEIGQHRTKI | 381 | 11 | 20 | 31 | 7653 |
| POL | LIKKEKVYLAW | 717 | 11 | 20 | 31 | 7654 |
| POL | TVKAACWWAGI | 877 | 11 | 20 | 31 | 7655 |
| POL | KVIHTDNGSNF | 863 | 11 | 21 | 33 | 7656 |
| POL | WQRPLVTI | 93 | 8 | 21 | 33 | 7657 |
| POL | EIGQHRTKI | 383 | 9 | 21 | 33 | 7658 |
| POL | EPIVGAETF | 624 | 9 | 21 | 33 | 7659 |
| POL | TLWQRPLVTI | 91 | 10 | 21 | 33 | 7660 |
| POL | IIGRNLLTQI | 171 | 10 | 21 | 33 | 7661 |
| POL | EPIVGAETFY | 624 | 10 | 21 | 33 | 7662 |
| POL | NIIGRNLLTQI | 170 | 11 | 21 | 33 | 7663 |
| POL | LLTQIGCTLNF | 176 | 11 | 21 | 33 | 7664 |
| POL | EPIVGAETFYV | 624 | 11 | 21 | 33 | 7665 |
| POL | DQWTYQIY | 527 | 8 | 22 | 34 | 7666 |
| POL | GIKQEFGI | 886 | 8 | 22 | 34 | 7667 |
| POL | GIKQEFGIPY | 886 | 10 | 22 | 34 | 7668 |
| POL | LLRGAKALTDI | 471 | 11 | 22 | 34 | 7669 |
| POL | YLAWVPAIIKGI | 724 | 11 | 22 | 34 | 7670 |
| POL | KLAGRWPVKVI | 855 | 11 | 22 | 34 | 7671 |
| POL | NPEIVIYQY | 364 | 9 | 23 | 36 | 7672 |
| POL | IILEGKVILV | 819 | 9 | 23 | 36 | 7673 |
| POL | KVILVAVIIV | 823 | 9 | 23 | 36 | 7674 |
| POL | NPEIVIYQYM | 364 | 10 | 23 | 36 | 7675 |
| POL | EICGKKAIGTV | 152 | 11 | 23 | 36 | 7676 |
| POL | IILEGKVILVAV | 819 | 11 | 23 | 36 | 7677 |
| POL | EICGKKAI | 152 | 8 | 24 | 38 | 7678 |
| POL | NPYNTPIF | 243 | 8 | 24 | 38 | 7679 |
| POL | EIVIYQYM | 366 | 8 | 24 | 38 | 7680 |
| POL | NQIIEQLI | 711 | 8 | 24 | 38 | 7681 |
| POL | VILVAVIIV | 824 | 8 | 24 | 38 | 7682 |
| POL | TVKAACWW | 877 | 8 | 24 | 38 | 7683 |
| POL | PVNIIGRNM | 168 | 9 | 24 | 38 | 7684 |
| POL | TPVNIIGRNM | 167 | 10 | 24 | 38 | 7685 |
| POL | GPENPYNTPI | 240 | 10 | 24 | 38 | 7686 |
| POL | NPYNTPIFAI | 243 | 10 | 24 | 38 | 7687 |
| POL | GQGQWTYQIY | 525 | 10 | 24 | 38 | 7688 |
| POL | VIHTDNGSNF | 864 | 10 | 24 | 38 | 7689 |
| POL | GPENPYNTPIF | 240 | 11 | 24 | 38 | 7690 |
| POL | LQDSGSEV | 678 | 8 | 25 | 39 | 7691 |
| POL | LLKLAGRW | 853 | 8 | 25 | 39 | 7692 |
| POL | KQGQGQWTY | 523 | 9 | 25 | 39 | 7693 |
| POL | GQGQWTYQI | 525 | 9 | 25 | 39 | 7694 |
| POL | ALQDSGSEV | 677 | 9 | 25 | 39 | 7695 |
| POL | FLLKLAGRW | 852 | 9 | 25 | 39 | 7696 |
| POL | LQDSGSEVNI | 678 | 10 | 25 | 39 | 7697 |
| POL | LLKLAGRWPV | 853 | 10 | 25 | 39 | 7698 |
| POL | KQGQGQWTYQI | 523 | 11 | 25 | 39 | 7699 |
| POL | ALQDSGSEVNI | 677 | 11 | 25 | 39 | 7700 |
| POL | LQDSGSEVNIV | 678 | 11 | 25 | 39 | 7701 |
| POL | AMASDFNLPPV | 773 | 11 | 25 | 39 | 7702 |
| POL | FLLKLAGRWPV | 852 | 11 | 25 | 39 | 7703 |
| POL | QLDCTHLEGKV | 814 | 11 | 26 | 41 | 7704 |
| POL | PIVAKEIV | 782 | 8 | 26 | 41 | 7705 |
| POL | EIGQHRAKI | 383 | 9 | 26 | 41 | 7706 |
| POL | RLPIQKETW | 582 | 9 | 26 | 41 | 7707 |
| POL | LVSSGIRKV | 743 | 9 | 26 | 41 | 7708 |
| POL | PPIVAKEIV | 781 | 9 | 26 | 41 | 7709 |
| POL | DPSKDLIAEI | 512 | 10 | 26 | 41 | 7710 |
| POL | KLVSSGIRKV | 742 | 10 | 26 | 41 | 7711 |
| POL | NLPPIVAKEI | 779 | 10 | 26 | 41 | 7712 |
| POL | LPPIVAKEIV | 780 | 10 | 26 | 41 | 7713 |
| POL | DLEIGQHRAKI | 381 | 11 | 26 | 41 | 7714 |
| POL | LVSSGIRKVLF | 743 | 11 | 26 | 41 | 7715 |
| POL | NLPPIVAKEIV | 779 | 11 | 26 | 41 | 7716 |
| POL | QIYAGIKV | 458 | 8 | 27 | 43 | 7717 |
| POL | QIYPGIKV | 458 | 8 | 27 | 43 | 7718 |
| POL | LQDSGLEV | 678 | 8 | 27 | 42 | 7719 |
| POL | AQEEHEKY | 760 | 8 | 27 | 42 | 7720 |
| POL | PPIVAKEI | 781 | 8 | 27 | 42 | 7721 |
| POL | SQIYAGIKV | 457 | 9 | 27 | 42 | 7722 |
| POL | SQIYPGIKV | 457 | 9 | 27 | 42 | 7723 |
| POL | IQKETWETW | 585 | 9 | 27 | 42 | 7724 |
| POL | ALQDSGLEV | 677 | 9 | 27 | 42 | 7725 |
| POL | LPPIVAKEI | 780 | 9 | 27 | 42 | 7726 |
| POL | PIQKETWETW | 584 | 10 | 27 | 42 | 7727 |
| POL | IQKETWETWW | 585 | 10 | 27 | 42 | 7728 |
| POL | LQDSGLEVNI | 678 | 10 | 27 | 42 | 7729 |
| POL | NLPPVVAKEI | 779 | 10 | 27 | 42 | 7730 |
| POL | LPPVVAKEIV | 780 | 10 | 27 | 42 | 7731 |
| POL | LPIQKETWETW | 583 | 11 | 27 | 42 | 7732 |
| POL | PIQKETWETWW | 584 | 11 | 27 | 42 | 7733 |
| POL | YVTDRGRQKVV | 649 | 11 | 27 | 42 | 7734 |
| POL | ALQDSGLEVNI | 677 | 11 | 27 | 42 | 7735 |
| POL | LQDSGLEVNIV | 678 | 11 | 27 | 42 | 7736 |
| POL | NLPPVVAKEIV | 779 | 11 | 27 | 42 | 7737 |
| POL | KQEFGIPY | 888 | 8 | 28 | 44 | 7738 |
| POL | KIKALTEI | 217 | 8 | 28 | 44 | 7739 |
| POL | PIVGAETF | 625 | 8 | 28 | 44 | 7740 |
| POL | IVGAETFY | 626 | 8 | 28 | 44 | 7741 |
| POL | QLIKKEKV | 716 | 8 | 28 | 44 | 7742 |
| POL | PVVAKEIV | 782 | 8 | 28 | 44 | 7743 |
| POL | PIVGAETFY | 625 | 9 | 28 | 44 | 7744 |
| POL | IVGAETFYV | 626 | 9 | 28 | 44 | 7745 |
| POL | EQLIKKEKV | 715 | 9 | 28 | 44 | 7746 |
| POL | QLIKKEKVY | 716 | 9 | 28 | 44 | 7747 |
| POL | LPPVVAKEI | 780 | 9 | 28 | 44 | 7748 |
| POL | PPVVAKEIV | 781 | 9 | 28 | 44 | 7749 |
| POL | PIVGAETFYV | 625 | 10 | 28 | 44 | 7750 |
| POL | EQLIKKEKVY | 715 | 10 | 28 | 44 | 7751 |
| POL | IIEQLIKKEKV | 713 | 11 | 28 | 44 | 7752 |
| POL | PPVVAKEI | 781 | 8 | 29 | 45 | 7753 |
| POL | IIDIIATDI | 952 | 9 | 29 | 45 | 7754 |
| POL | YVTDRGRQKV | 649 | 10 | 29 | 45 | 7755 |
| POL | QVDKLVSSGI | 739 | 10 | 29 | 45 | 7756 |
| POL | RIIDIIATDI | 951 | 10 | 29 | 45 | 7757 |
| POL | EQVDKLVSSGI | 738 | 11 | 29 | 45 | 7758 |
| POL | TPKFRLPI | 578 | 8 | 30 | 47 | 7759 |
| POL | IILVAVIIV | 824 | 8 | 30 | 47 | 7760 |
| POL | KIILVAVIIV | 823 | 9 | 30 | 47 | 7761 |
| POL | KLAGRWPVKV | 855 | 10 | 30 | 47 | 7762 |
| POL | GQWTYQIY | 527 | 8 | 31 | 48 | 7763 |
| POL | YQLEKEPI | 619 | 8 | 31 | 48 | 7764 |
| POL | GQETAYFI | 846 | 8 | 31 | 48 | 7765 |
| POL | HLEGKIILV | 819 | 9 | 31 | 48 | 7766 |
| POL | IPSINNETPGI | 321 | 11 | 31 | 48 | 7767 |
| POL | GVYYDPSKDLI | 508 | 11 | 31 | 48 | 7768 |
| POL | KLWYQLEKEPI | 616 | 11 | 31 | 48 | 7769 |
| POL | HLEGKIILVAV | 819 | 11 | 31 | 48 | 7770 |
| POL | KQLTEAVQKI | 558 | 10 | 32 | 51 | 7771 |
| POL | AVKAACWW | 877 | 8 | 32 | 50 | 7772 |
| POL | SINNETPGI | 323 | 9 | 32 | 50 | 7773 |
| POL | FILKLAGRW | 852 | 9 | 32 | 50 | 7774 |
| POL | EMEKEGKISKI | 229 | 11 | 32 | 50 | 7775 |
| POL | SINNETPGIRY | 323 | 11 | 32 | 50 | 7776 |
| POL | FILKLAGRWPV | 852 | 11 | 32 | 50 | 7777 |
| POL | QLDCTIILEGKI | 814 | 11 | 33 | 52 | 7778 |
| POL | DVKQLTEAV | 556 | 9 | 33 | 52 | 7779 |
| POL | ELQKQITKI | 964 | 9 | 34 | 54 | 7780 |
| POL | KQITKIQNF | 967 | 9 | 34 | 54 | 7781 |
| POL | KQITKIQNFRV | 967 | 11 | 34 | 54 | 7782 |
| POL | ILKLAGRW | 853 | 8 | 34 | 53 | 7783 |
| POL | QLTEAVQKI | 559 | 9 | 34 | 53 | 7784 |
| POL | ILKLAGRWPV | 853 | 10 | 34 | 53 | 7785 |
| POL | LQKQITKIQNF | 965 | 11 | 34 | 53 | 7786 |
| POL | RVYYRDSRDPI | 976 | 11 | 34 | 53 | 7787 |
| POL | LIKKEKVY | 717 | 8 | 35 | 55 | 7788 |
| POL | QITKIQNF | 968 | 8 | 35 | 55 | 7789 |
| POL | NLPGKWKPKM | 124 | 10 | 35 | 55 | 7790 |
| POL | QITKIQNFRV | 968 | 10 | 35 | 55 | 7791 |
| POL | NLPGKWKPKMI | 124 | 11 | 35 | 55 | 7792 |
| POL | QITKIQNFRVY | 968 | 11 | 35 | 55 | 7793 |
| POL | PIWKGPAKLLW | 985 | 11 | 35 | 55 | 7794 |
| POL | KLGKAGYV | 643 | 8 | 36 | 56 | 7795 |
| POL | LQKQITKI | 965 | 8 | 36 | 56 | 7796 |
| POL | AIFQSSMTKI | 347 | 10 | 36 | 56 | 7797 |
| POL | AQPDKSESELV | 700 | 11 | 36 | 56 | 7798 |
| POL | VIQDNSDI | 1003 | 8 | 37 | 58 | 7799 |
| POL | VVIQDNSDI | 1002 | 9 | 37 | 58 | 7800 |
| POL | NPYNTPVFAI | 243 | 10 | 37 | 58 | 7801 |
| POL | QPDKSESELV | 701 | 10 | 37 | 58 | 7802 |
| POL | AVVIQDNSDI | 1000 | 10 | 37 | 58 | 7803 |
| POL | VIQDNSDIKV | 1003 | 10 | 37 | 38 | 7804 |
| POL | YLSWVPAHKGI | 724 | 11 | 37 | 58 | 7805 |
| POL | VVIQDNSDIKV | 1002 | 11 | 37 | 58 | 7806 |
| POL | VIQDNSDIKVV | 1003 | 11 | 37 | 58 | 7807 |
| POL | NPYNTPVF | 243 | 8 | 38 | 59 | 7808 |
| POL | FQSSMTKI | 349 | 8 | 38 | 59 | 7809 |
| POL | IQDNSDIKV | 1004 | 9 | 38 | 59 | 7810 |
| POL | GPENPYNTPV | 240 | 10 | 38 | 59 | 7811 |
| POL | IQDNSDIKVV | 1004 | 10 | 38 | 59 | 7812 |
| POL | GPENPYNTPVF | 240 | 11 | 38 | 59 | 7813 |
| POL | ILKEPVHGVYY | 498 | 11 | 38 | 59 | 7814 |
| POL | LPGKWKPKM | 125 | 9 | 39 | 61 | 7815 |
| POL | LPGKWKPKMI | 125 | 10 | 39 | 61 | 7816 |
| POL | LPEKDSWTV | 435 | 9 | 40 | 63 | 7817 |
| POL | ILKEPVHGVY | 498 | 10 | 40 | 63 | 7818 |
| POL | EILKEPVHGVY | 497 | 11 | 40 | 63 | 7819 |
| POL | KVRQYDQI | 142 | 8 | 41 | 64 | 7820 |
| POL | QIGCTLNF | 179 | 8 | 41 | 64 | 7821 |
| POL | EPVHGVYY | 504 | 8 | 41 | 64 | 7822 |
| POL | TQIGCTLNF | 178 | 9 | 41 | 64 | 7823 |
| POL | ILKEPVHGV | 498 | 9 | 41 | 64 | 7824 |
| POL | FIKVRQYDQI | 140 | 10 | 41 | 64 | 7825 |
| POL | QIGCTLNFPI | 179 | 10 | 41 | 64 | 7826 |
| POL | EILKEPVIIGV | 497 | 10 | 41 | 64 | 7827 |
| POL | TQIGCTLNFPI | 178 | 11 | 41 | 64 | 7828 |
| POL | KISKIGPENPY | 235 | 11 | 41 | 64 | 7829 |
| POL | SIVIWGKTPKF | 571 | 11 | 41 | 64 | 7830 |
| POL | EMEKEGKI | 229 | 8 | 42 | 66 | 7831 |
| POL | SPAIFQSSM | 345 | 9 | 42 | 66 | 7832 |
| POL | NQKTELQAI | 666 | 9 | 42 | 66 | 7833 |
| POL | IVIYQYMDDLY | 367 | 11 | 42 | 66 | 7834 |
| POL | YQIYQEPF | 531 | 8 | 43 | 67 | 7835 |
| POL | SMTKILEPF | 352 | 9 | 43 | 67 | 7836 |
| POL | QMAGDDCV | 1027 | 8 | 44 | 69 | 7837 |
| POL | KQMAGDDCV | 1026 | 9 | 44 | 69 | 7838 |
| POL | IQTKELQKQI | 960 | 10 | 44 | 69 | 7839 |
| POL | DIQTKELQKQI | 959 | 11 | 44 | 69 | 7840 |
| POL | EPFKNLKTGKY | 536 | 11 | 45 | 70 | 7841 |
| POL | DQAEHLKTAV | 919 | 10 | 46 | 72 | 7842 |
| POL | LPIQKETW | 583 | 8 | 47 | 73 | 7843 |
| POL | VIWGKTPKF | 573 | 9 | 47 | 73 | 7844 |
| POL | QITLWQRPLV | 89 | 10 | 47 | 73 | 7845 |
| POL | IVIWGKTPKF | 572 | 10 | 47 | 73 | 7846 |
| POL | PQITLWQRPLV | 88 | 11 | 47 | 73 | 7847 |
| POL | KLKPGMDGPKV | 197 | 11 | 47 | 73 | 7848 |
| POL | LVAVHVASGYI | 826 | 11 | 47 | 73 | 7849 |
| POL | TLWQRPLV | 91 | 8 | 49 | 77 | 7850 |
| POL | GLKKKKSVTV | 288 | 10 | 49 | 77 | 7851 |
| POL | GIRKVLFLDGI | 747 | 11 | 49 | 77 | 7852 |
| POL | KVLFLDGI | 750 | 8 | 50 | 78 | 7853 |
| POL | VPRRKAKII | 1013 | 9 | 50 | 78 | 7854 |
| POL | IIRDYGKQM | 1020 | 9 | 50 | 78 | 7855 |
| POL | VVPRRKAKII | 1012 | 10 | 50 | 78 | 7856 |
| POL | KIIRDYGKQM | 1019 | 10 | 50 | 78 | 7857 |
| POL | HPAGLKKKKSV | 285 | 11 | 50 | 78 | 7858 |
| POL | KVVPRRKAKII | 1011 | 11 | 50 | 78 | 7859 |
| POL | KIGPENPY | 238 | 8 | 51 | 80 | 7860 |
| POL | VPRRKAKI | 1013 | 8 | 51 | 80 | 7861 |
| POL | KPGMDGPKV | 199 | 9 | 51 | 80 | 7862 |
| POL | VVPRRKAKI | 1012 | 9 | 51 | 80 | 7863 |
| POL | GMDGPKVKQW | 201 | 10 | 51 | 80 | 7864 |
| POL | TPGIRYQYNV | 328 | 10 | 51 | 80 | 7865 |
| POL | VIYQYMDDLY | 368 | 10 | 51 | 80 | 7866 |
| POL | KVVPRRKAKI | 1011 | 10 | 51 | 80 | 7867 |
| POL | VLVGPTPVNII | 162 | 11 | 51 | 80 | 7868 |
| POL | VIYQYMDDLYV | 368 | 11 | 51 | 80 | 7869 |
| POL | WIPEWEFV | 602 | 8 | 52 | 84 | 7870 |
| POL | IQNFRVYY | 972 | 8 | 52 | 84 | 7871 |
| POL | GLKKKKSV | 288 | 8 | 52 | 81 | 7872 |
| POL | TPGIRYQY | 328 | 8 | 52 | 81 | 7873 |
| POL | GIRYQYNV | 330 | 8 | 52 | 81 | 7874 |
| POL | KIQNFRVY | 971 | 8 | 52 | 81 | 7875 |
| POL | KIQNFRVYY | 971 | 9 | 52 | 81 | 7876 |
| POL | LVGPTPVNII | 163 | 10 | 52 | 81 | 7877 |
| POL | WQATWIPEWEF | 598 | 11 | 52 | 81 | 7878 |
| POL | HVASGYIEAEV | 830 | 11 | 52 | 81 | 7879 |
| POL | VLVGPTPV | 162 | 8 | 53 | 83 | 7880 |
| POL | CQLKGEAM | 795 | 8 | 53 | 83 | 7881 |
| POL | SQGVVESM | 899 | 8 | 53 | 83 | 7882 |
| POL | TVLVGPTPV | 161 | 9 | 53 | 83 | 7883 |
| POL | AVHVASGYI | 828 | 9 | 53 | 83 | 7884 |
| POL | SMNKELKKI | 905 | 9 | 53 | 83 | 7885 |
| POL | VLVGPTPVNI | 162 | 10 | 53 | 83 | 7886 |
| POL | HPDKWTVQPI | 424 | 10 | 53 | 83 | 7887 |
| POL | ELELAENREI | 489 | 10 | 53 | 83 | 7888 |
| POL | LVAVHVASGY | 826 | 10 | 53 | 83 | 7889 |
| POL | PQSQGVVESM | 897 | 10 | 53 | 83 | 7890 |
| POL | SMNKELKKII | 905 | 10 | 53 | 83 | 7891 |
| POL | GIGGFIKVRQY | 136 | 11 | 53 | 83 | 7892 |
| POL | TVLVGPTPVNI | 161 | 11 | 53 | 83 | 7893 |
| POL | VLDVGDAYFSV | 297 | 11 | 53 | 83 | 7894 |
| POL | QLKGEAMHGQV | 796 | 11 | 53 | 83 | 7895 |
| POL | ILVAVHVASGY | 825 | 11 | 53 | 83 | 7896 |
| POL | NPQSQGVVESM | 896 | 11 | 53 | 83 | 7897 |
| POL | FVNTPPLV | 608 | 8 | 54 | 86 | 7898 |
| POL | FVNTPPLVKLW | 608 | 11 | 54 | 86 | 7899 |
| POL | GPTPVNII | 165 | 8 | 54 | 84 | 7900 |
| POL | LVGPTPVNI | 163 | 9 | 54 | 84 | 7901 |
| POL | DVGDAYFSV | 299 | 9 | 54 | 84 | 7902 |
| POL | WQATWIPEW | 598 | 9 | 54 | 84 | 7903 |
| POL | TVPVKLKPGM | 193 | 10 | 54 | 84 | 7904 |
| POL | FPISIETVPV | 186 | 11 | 55 | 86 | 7905 |
| POL | TQDFWEVQLGI | 273 | 11 | 55 | 86 | 7906 |
| POL | SPIETVPV | 189 | 8 | 56 | 88 | 7907 |
| POL | PVKLKPGM | 195 | 8 | 56 | 88 | 7908 |
| POL | WPLTEEKI | 211 | 8 | 56 | 88 | 7909 |
| POL | FPISPIETV | 186 | 9 | 56 | 88 | 7910 |
| POL | VPVKLKPGM | 194 | 9 | 56 | 88 | 7911 |
| POL | PISPIETVPV | 187 | 10 | 56 | 88 | 7912 |
| POL | KQWPLTEEKI | 209 | 10 | 56 | 88 | 7913 |
| POL | SVTVLDVGDAY | 294 | 11 | 56 | 88 | 7914 |
| POL | PISPIETV | 187 | 8 | 57 | 89 | 7915 |
| POL | ELAENREI | 491 | 8 | 57 | 89 | 7916 |
| POL | TPPLVKLW | 611 | 8 | 57 | 89 | 7917 |
| POL | PPLVKLWY | 612 | 8 | 57 | 89 | 7918 |
| POL | QVDCSPGI | 805 | 8 | 57 | 89 | 7919 |
| POL | HLKTAVQM | 923 | 8 | 57 | 89 | 7920 |
| POL | ELNKRTQDF | 268 | 9 | 57 | 89 | 7921 |
| POL | TVLDVGDAY | 296 | 9 | 57 | 89 | 7922 |
| POL | TPPLVKLWY | 611 | 9 | 57 | 89 | 7923 |
| POL | GQVDCSPGI | 804 | 9 | 57 | 89 | 7924 |
| POL | QVDCSPGIW | 805 | 9 | 57 | 89 | 7925 |
| POL | ELKKIIGQV | 909 | 9 | 57 | 89 | 7926 |
| POL | AIKKKDSTKW | 251 | 10 | 57 | 89 | 7927 |
| POL | ELNKRTQDFW | 268 | 10 | 57 | 89 | 7928 |
| POL | TVLDVGDAYF | 296 | 10 | 57 | 89 | 7929 |
| POL | GQVDCSPGIW | 804 | 10 | 57 | 89 | 7930 |
| POL | IILKTAVQMAV | 923 | 10 | 57 | 89 | 7931 |
| POL | IILKIAVQMAVF | 923 | 11 | 57 | 89 | 7932 |
| POL | GIGGYSAGERI | 942 | 11 | 57 | 89 | 7933 |
| POL | LPQGWKGSPAI | 338 | 11 | 58 | 92 | 7934 |
| POL | YVGSDLEI | 377 | 8 | 58 | 91 | 7935 |
| POL | DLYVGSDLEI | 375 | 10 | 58 | 91 | 7936 |
| POL | IVTDSQYALGI | 687 | 11 | 58 | 91 | 7937 |
| POL | IPAETGQETAY | 841 | 11 | 58 | 91 | 7938 |
| POL | FIHNFKRKGGI | 933 | 11 | 58 | 91 | 7939 |
| POL | SQYALGII | 691 | 8 | 59 | 92 | 7940 |
| POL | GIGGNEQV | 733 | 8 | 59 | 92 | 7941 |
| POL | AVIIVASGY | 828 | 8 | 59 | 92 | 7942 |
| POL | KLAGRWPV | 855 | 8 | 59 | 92 | 7943 |
| POL | NPQSQGVV | 896 | 8 | 59 | 92 | 7944 |
| POL | PQGWKGSPAI | 339 | 10 | 59 | 92 | 7945 |
| POL | EVNIVTDSQY | 684 | 10 | 59 | 92 | 7946 |
| POL | PQGWKGSPAIF | 339 | 11 | 59 | 92 | 7947 |
| POL | IPYNPQSQGVV | 893 | 11 | 59 | 92 | 7948 |
| POL | KLLWKGEGAVV | 992 | 11 | 59 | 92 | 7949 |
| POL | LLWKGEGAVVI | 993 | 11 | 59 | 92 | 7950 |
| POL | KPKMIGGI | 130 | 8 | 60 | 94 | 7951 |
| POL | VLDVGDAY | 297 | 8 | 60 | 94 | 7952 |
| POL | AVQMAVFI | 927 | 8 | 60 | 94 | 7953 |
| POL | VLDVGDAYF | 297 | 9 | 60 | 94 | 7954 |
| POL | ELHPDKWTV | 422 | 9 | 60 | 94 | 7955 |
| POL | KLNWASQIY | 452 | 9 | 60 | 94 | 7956 |
| POL | QMAVFIHNF | 929 | 9 | 60 | 94 | 7957 |
| POL | VQMAVFIHNF | 928 | 10 | 60 | 94 | 7958 |
| POL | KLLWKGEGAV | 992 | 10 | 60 | 94 | 7959 |
| POL | KPKMIGGIGGF | 130 | 11 | 60 | 94 | 7960 |
| POL | WMGYELHPDKW | 418 | 11 | 60 | 94 | 7961 |
| POL | LVGKLNWASQI | 449 | 11 | 60 | 94 | 7962 |
| POL | AVQMAVFIIINF | 927 | 11 | 60 | 94 | 7963 |
| POL | TLNFPISPI | 183 | 9 | 61 | 97 | 7964 |
| POL | YQYMDDLY | 370 | 8 | 61 | 95 | 7965 |
| POL | KLNWASQI | 452 | 8 | 61 | 95 | 7966 |
| POL | YQYMDDLYV | 370 | 9 | 61 | 95 | 7967 |
| POL | TVNDIQKLV | 442 | 9 | 61 | 95 | 7968 |
| POL | LLWKGEGAVV | 993 | 10 | 61 | 95 | 7969 |
| POL | ALLDTGADDTV | 109 | 11 | 61 | 95 | 7970 |
| POL | MIGGIGGF | 133 | 8 | 62 | 97 | 7971 |
| POL | KLVGKLNW | 448 | 8 | 62 | 97 | 7972 |
| POL | NIVTDSQY | 686 | 8 | 62 | 97 | 7973 |
| POL | KMIGGIGGF | 132 | 9 | 62 | 97 | 7974 |
| POL | MIGGIGGFI | 133 | 9 | 62 | 97 | 7975 |
| POL | IIQKEPPFLW | 410 | 9 | 62 | 97 | 7976 |
| POL | LLWKGEGAV | 993 | 9 | 62 | 97 | 7977 |
| POL | KMIGGIGGFI | 132 | 10 | 62 | 97 | 7978 |
| POL | HQKEPPFLWM | 410 | 10 | 62 | 97 | 7979 |
| POL | IQKLVGKLNW | 446 | 10 | 62 | 97 | 7980 |
| POL | MIGGIGGFIKV | 133 | 11 | 62 | 97 | 7981 |
| POL | DIQKLVGKLNW | 445 | 11 | 62 | 97 | 7982 |
| POL | WVPAHKGI | 727 | 8 | 63 | 98 | 7983 |
| POL | EPPFLWMGY | 413 | 9 | 63 | 98 | 7984 |
| POL | LLDTGADDTV | 110 | 10 | 63 | 98 | 7985 |
| POL | YQYNVLPQGW | 333 | 10 | 63 | 98 | 7986 |
| POL | IPYNPQSQGV | 893 | 10 | 63 | 98 | 7987 |
| POL | GIPYNPQSQGV | 892 | 11 | 63 | 98 | 7988 |
| POL | GIGGFIKV | 136 | 8 | 64 | 100 | 7989 |
| POL | PPFLWMGY | 414 | 8 | 64 | 100 | 7990 |
| REV | PQGTETGV | 101 | 8 | 05 | 18 | 7991 |
| REV | SQGTETGV | 101 | 8 | 05 | 18 | 7992 |
| REV | QPQGTETGV | 100 | 9 | 05 | 18 | 7993 |
| REV | CLGRPAEPV | 67 | 9 | 10 | 16 | 7994 |
| REV | TQGVGSPQI | 98 | 9 | 11 | 18 | 7995 |
| REV | LLKTVRLI | 12 | 8 | 11 | 17 | 7996 |
| REV | RQRQIHSI | 52 | 8 | 11 | 17 | 7997 |
| REV | VPLQLPPI | 75 | 8 | 11 | 17 | 7998 |
| REV | PVPLQLPPI | 74 | 9 | 11 | 17 | 7999 |
| REV | EPVPLQLPPI | 73 | 10 | 11 | 17 | 8000 |
| REV | AVRIIKILY | 17 | 9 | 13 | 20 | 8001 |
| REV | RQARKNRRRRW | 39 | 11 | 16 | 25 | 8002 |
| REV | IIKILYQSNPY | 20 | 11 | 18 | 28 | 8003 |
| REV | KILYQSNPY | 22 | 9 | 26 | 41 | 8004 |
| REV | ILYQSNPY | 23 | 8 | 27 | 42 | 8005 |
| REV | RQARRNRRRRW | 39 | 11 | 38 | 59 | 8006 |
| TAT | GPKESKKKV | 90 | 9 | 13 | 20 | 8007 |
| TAT | EPVDPRLEPW | 2 | 10 | 13 | 20 | 8008 |
| TAT | FLNKGLGI | 41 | 8 | 14 | 22 | 8009 |
| TAT | PVDPRLEPW | 3 | 9 | 14 | 22 | 8010 |
| TAT | EPVDPNLEPW | 2 | 10 | 14 | 22 | 8011 |
| TAT | FLNKGLGISY | 41 | 10 | 14 | 22 | 8012 |
| TAT | PVDPNLEPW | 3 | 9 | 20 | 31 | 8013 |
| VIF | ALIKPKKI | 157 | 8 | 10 | 16 | 8014 |
| VIF | PLGEARLVI | 58 | 9 | 10 | 16 | 8015 |
| VIF | QVDRMRINTW | 12 | 10 | 10 | 16 | 8016 |
| VIF | HIPLGDARLV | 56 | 10 | 10 | 16 | 8017 |
| VIF | IPLGEARLVI | 57 | 10 | 10 | 16 | 8018 |
| VIF | WQVDRMRINTW | 11 | 11 | 10 | 16 | 8019 |
| VIF | IIIPLGEARLVI | 56 | 11 | 10 | 16 | 8020 |
| VIF | GVSIEWRLRRY | 87 | 11 | 10 | 16 | 8021 |
| VIF | QIDPDLADQLI | 102 | 11 | 10 | 16 | 8022 |
| VIF | PLGDARLV | 58 | 8 | 11 | 17 | 8023 |
| VIF | IPLGDARLV | 57 | 9 | 11 | 17 | 8024 |
| VIF | SIEWRLRRY | 89 | 9 | 11 | 17 | 8025 |
| VIF | GLADQLIIIMIIY | 106 | 11 | 11 | 17 | 8026 |
| VIF | RLVITTYW | 65 | 8 | 12 | 19 | 8027 |
| VIF | LQTGERDW | 74 | 8 | 12 | 19 | 8028 |
| VIF | KIRTWNSLV | 17 | 9 | 12 | 19 | 8029 |
| VIF | GLQTGERDW | 73 | 9 | 12 | 19 | 8030 |
| VIF | IVWQVDRMKI | 9 | 10 | 12 | 19 | 8031 |
| VIF | QVDRMKIRTW | 12 | 10 | 12 | 19 | 8032 |
| VIF | WQVDRMKIRTW | 11 | 11 | 12 | 19 | 8033 |
| VIF | RMKIRTWNSLV | 15 | 11 | 12 | 19 | 8034 |
| VIF | WQVDRMKI | 11 | 8 | 13 | 20 | 8035 |
| VIF | HPKISSEV | 48 | 8 | 13 | 20 | 8036 |
| VIF | HPRISSEV | 48 | 8 | 13 | 20 | 8037 |
| VIF | DQLIHMIIY | 109 | 8 | 13 | 20 | 8038 |
| VIF | DQLIIIMIIYF | 109 | 9 | 13 | 20 | 8039 |
| VIF | IIPKISSEVHI | 48 | 10 | 13 | 20 | 8040 |
| VIF | IIPRISSEVIII | 48 | 10 | 13 | 20 | 8041 |
| VIF | SVKKLTEDRW | 174 | 10 | 13 | 20 | 8042 |
| VIF | QLIHLYYFDCF | 110 | 11 | 13 | 20 | 8043 |
| VIF | DQLIIILYY | 109 | 8 | 14 | 22 | 8044 |
| VIF | QLIIILYYF | 110 | 8 | 14 | 22 | 8045 |
| VIF | QLIIIMIIYF | 110 | 8 | 14 | 22 | 8046 |
| VIF | IVSPRCEY | 133 | 8 | 14 | 22 | 8047 |
| VIF | DQLIHLYYF | 109 | 9 | 14 | 22 | 8048 |
| VIF | QVDPGLADQLI | 102 | 11 | 14 | 22 | 8049 |
| VIF | QLIHMIIFPDCF | 110 | 11 | 14 | 22 | 8050 |
| VIF | KISSEVIII | 50 | 8 | 15 | 23 | 8051 |
| VIF | RISSEVIII | 50 | 8 | 15 | 23 | 8052 |
| VIF | HMIIYFDCF | 113 | 8 | 15 | 23 | 8053 |
| VIF | RIRTWKSLV | 17 | 9 | 15 | 23 | 8054 |
| VIF | RIRTWNSLV | 17 | 9 | 15 | 23 | 8055 |
| VIF | GLADQLIHM | 106 | 9 | 15 | 23 | 8056 |
| VIF | LIHMHYFDCF | 111 | 10 | 15 | 23 | 8057 |
| VIF | RMRIRTWKSLV | 15 | 11 | 15 | 23 | 8058 |
| VIF | RMRIRTWNSLV | 15 | 11 | 15 | 23 | 8059 |
| VIF | HLYYPDCF | 113 | 8 | 16 | 25 | 8060 |
| VIF | LIHLYYFDCF | 111 | 10 | 16 | 25 | 8061 |
| VIF | LVKIIIIMYI | 24 | 8 | 19 | 30 | 8062 |
| VIF | IIPKVSSEV | 48 | 8 | 19 | 30 | 8063 |
| VIF | PLGEARLV | 58 | 8 | 19 | 30 | 8064 |
| VIF | SLVKHIIMYI | 23 | 9 | 19 | 30 | 8065 |
| VIF | IPLGEARLV | 57 | 9 | 19 | 30 | 8066 |
| VIF | DPDLADQLI | 104 | 9 | 19 | 30 | 8067 |
| VIF | DPGLADQLI | 104 | 9 | 19 | 30 | 8068 |
| VIF | KIKPPLPSV | 164 | 9 | 19 | 30 | 8069 |
| VIF | IIPKYSSEVIII | 48 | 10 | 19 | 30 | 8070 |
| VIF | HIPLGEARLV | 56 | 10 | 19 | 30 | 8071 |
| VIF | KYSSEVIII | 50 | 8 | 20 | 31 | 8072 |
| VIF | LVKIIIIMYV | 24 | 8 | 21 | 33 | 8073 |
| VIF | SLVKIIIIMYV | 23 | 9 | 21 | 33 | 8074 |
| VIF | GLIITGERDW | 73 | 9 | 22 | 34 | 8075 |
| VIF | IILGIIGVSI | 83 | 8 | 25 | 39 | 8076 |
| VIF | IILGIIGVSIEW | 83 | 10 | 25 | 39 | 8077 |
| VIF | IILGQGVSI | 83 | 8 | 26 | 41 | 8078 |
| VIF | GQGVSIEW | 85 | 8 | 26 | 41 | 8079 |
| VIF | IILGQGVSIEW | 83 | 10 | 26 | 41 | 8080 |
| VIF | SLQYLALTALI | 149 | 11 | 27 | 42 | 8081 |
| VIF | YLALTALI | 152 | 8 | 28 | 44 | 8082 |
| VIF | LQYLALTALI | 150 | 10 | 28 | 44 | 8083 |
| VIF | QVDRMRIRTW | 12 | 10 | 31 | 48 | 8084 |
| VIF | WQVDRMRIRTW | 11 | 11 | 31 | 48 | 8085 |
| VIF | YQAGIINKV | 140 | 8 | 38 | 59 | 8086 |
| VIF | QVMIVWQV | 6 | 8 | 43 | 67 | 8087 |
| VIF | WQVMIVWQV | 5 | 9 | 43 | 67 | 8088 |
| VIF | QVMIVWQVDRM | 6 | 11 | 43 | 67 | 8089 |
| VIF | MIVWQVDRMRI | 8 | 11 | 43 | 67 | 8090 |
| VIF | SLVKHIIMY | 23 | 8 | 44 | 69 | 8091 |
| VIF | VMIVWQVDRM | 7 | 10 | 44 | 69 | 8092 |
| VIF | MIVWQVDRM | 8 | 9 | 46 | 72 | 8093 |
| VIF | IVWQVDRMRI | 9 | 10 | 47 | 73 | 8094 |
| VIF | WQVDRMRI | 11 | 8 | 48 | 75 | 8095 |
| VIF | IVWQVDRM | 9 | 8 | 59 | 92 | 8096 |
| VPR | RPWLHGLGQY | 36 | 10 | 10 | 16 | 8097 |
| VPR | QQLLPVHF | 65 | 8 | 10 | 16 | 8098 |
| VPR | LQQLLFVHF | 64 | 9 | 10 | 16 | 8099 |
| VPR | QLLFVHFRI | 66 | 9 | 10 | 16 | 8100 |
| VPR | QQLLFVHFRI | 65 | 10 | 10 | 16 | 8101 |
| VPR | LQQLLFVHFRI | 64 | 11 | 10 | 16 | 8102 |
| VPR | KQEAVRHF | 27 | 8 | 11 | 17 | 8103 |
| VPR | WLHGLGQY | 38 | 8 | 11 | 17 | 8104 |
| VPR | RIGCRHSRIGI | 74 | 11 | 11 | 17 | 8105 |
| VPR | RPWLHGLGQHI | 36 | 11 | 12 | 19 | 8106 |
| VPR | LLFVHFRI | 67 | 8 | 12 | 19 | 8107 |
| VPR | RIGCRHSRI | 74 | 9 | 12 | 19 | 8108 |
| VPR | GQHIYNTY | 43 | 8 | 13 | 20 | 8109 |
| VPR | AVRHFPRI | 30 | 8 | 14 | 22 | 8110 |
| VPR | GQYIYETY | 43 | 8 | 14 | 22 | 8111 |
| VPR | AVRHFPRIW | 30 | 9 | 14 | 22 | 8112 |
| VPR | HIYNTYGDTW | 45 | 10 | 14 | 22 | 8113 |
| VPR | YIYETYGDTW | 45 | 10 | 14 | 22 | 8114 |
| VPR | ELKSEAVRHF | 25 | 10 | 15 | 23 | 8115 |
| VPR | CQHSRIGII | 77 | 9 | 16 | 25 | 8116 |
| VPR | LLEELKSEAV | 22 | 10 | 16 | 25 | 8117 |
| VPR | ELLEELKNEAV | 21 | 11 | 16 | 25 | 8118 |
| VPR | ELLEELKSEAV | 21 | 11 | 16 | 25 | 8119 |
| VPR | GQIIIYETY | 43 | 8 | 17 | 27 | 8120 |
| VPR | LLEELKNEAV | 22 | 10 | 17 | 27 | 8121 |
| VPR | ELKNEAVRHF | 25 | 10 | 17 | 27 | 8122 |
| VPR | HIYETYGDTW | 45 | 10 | 17 | 27 | 8123 |
| VPR | WLIIGLGQIII | 38 | 9 | 20 | 31 | 8124 |
| VPR | WLIIGLGQIIIY | 38 | 10 | 20 | 31 | 8125 |
| VPR | IIRILQQLLFI | 60 | 11 | 33 | 52 | 8126 |
| VPR | GVEAIIRI | 56 | 8 | 34 | 53 | 8127 |
| VPR | AVRIIFPRPW | 30 | 9 | 34 | 53 | 8128 |
| VPR | RILQQLLFIIIF | 62 | 11 | 34 | 53 | 8129 |
| VPR | ILQQLLFIIIF | 63 | 10 | 35 | 55 | 8130 |
| VPR | RILQQLLFI | 62 | 9 | 36 | 56 | 8131 |
| VPR | ILQQLLFI | 63 | 8 | 37 | 58 | 8132 |
| VPR | PQREPYNEW | 10 | 9 | 37 | 58 | 8133 |
| VPR | GPQREPYNEW | 9 | 10 | 37 | 58 | 8134 |
| VPR | AIIRILQQLLF | 59 | 11 | 38 | 59 | 8135 |
| VPR | DQGPQREPY | 7 | 9 | 41 | 64 | 8136 |
| VPR | IIRILQQLLF | 60 | 10 | 41 | 64 | 8137 |
| VPR | QQLLFIHF | 65 | 8 | 44 | 69 | 8138 |
| VPR | LLFIHFRI | 67 | 8 | 44 | 69 | 8139 |
| VPR | LQQLLFIHF | 64 | 9 | 44 | 69 | 8140 |
| VPR | QLLFIHFRI | 66 | 9 | 44 | 69 | 8141 |
| VPR | QQLLFIIIFRI | 65 | 10 | 44 | 69 | 8142 |
| VPR | LQQLLFIIIFRI | 64 | 11 | 44 | 69 | 8143 |
| VPR | RILQQLLF | 62 | 8 | 45 | 70 | 8144 |
| VPR | CQHSRIGI | 77 | 8 | 45 | 70 | 8145 |
| VPR | RIGCQHSRIGI | 74 | 11 | 45 | 70 | 8146 |
| VPR | RIGCQHSRI | 74 | 9 | 47 | 73 | 8147 |
| VPU | KVDYRIVI | 7 | 8 | 01 | 33 | 8148 |
| VPU | KVDYRLGV | 7 | 8 | 01 | 33 | 8149 |
| VPU | RIDYRLGV | 7 | 8 | 01 | 33 | 8150 |
| VPU | KVDYRIVIV | 7 | 9 | 01 | 33 | 8151 |
| VPU | KVDYRIVIVAF | 7 | 11 | 01 | 33 | 8152 |
| VPU | GVEMGHHAPW | 91 | 10 | 01 | 50 | 8153 |
| VPU | RIKEIRDDSDY | 64 | 11 | 01 | 50 | 8154 |
| VPU | RIREIRDDSDY | 64 | 11 | 01 | 50 | 8155 |
| VPU | LIIAIVVW | 26 | 8 | 10 | 16 | 8156 |
| VPU | DQEELSALV | 79 | 9 | 11 | 18 | 8157 |
| VPU | ILAIVALVV | 12 | 9 | 11 | 17 | 8158 |
| VPU | EMGHHAPW | 89 | 8 | 11 | 17 | 8159 |
| VPU | ILAIVALV | 12 | 8 | 12 | 19 | 8160 |
| VPU | IVFIEYRKI | 36 | 9 | 12 | 19 | 8161 |
| VPU | VVWTIVFIEY | 31 | 10 | 12 | 19 | 8162 |
| VPU | IVVWTIVFIEY | 30 | 11 | 12 | 19 | 8163 |
| VPU | ILRQRKIDRLI | 46 | 11 | 13 | 20 | 8164 |
| VPU | AIVVWTIVF | 29 | 9 | 14 | 22 | 8165 |
| VPU | KIDRLIDRI | 52 | 9 | 14 | 22 | 8166 |
| VPU | AIVVWTIVFI | 29 | 10 | 14 | 22 | 8167 |
| VPU | IVVWTIVF | 30 | 8 | 15 | 23 | 8168 |
| VPU | VVWTIVFI | 31 | 8 | 15 | 23 | 8169 |
| VPU | KILRQRKI | 45 | 8 | 15 | 23 | 8170 |
| VPU | IVVWTIVFI | 30 | 9 | 15 | 23 | 8171 |
| VPU | RQRKIDRLI | 48 | 9 | 17 | 27 | 8172 |
| VPU | IIAIVVWTIV | 27 | 10 | 20 | 31 | 8173 |
| VPU | IIAIVVWTI | 27 | 9 | 23 | 36 | 8174 |
| VPU | AIVVWTIV | 29 | 8 | 29 | 45 | 8175 |

[0395] TABLE XV

HIV A01 Motif Peptides with Binding Information

| | | | | | | | |
|---|---|---|---|---|---|---|---|
| | | | | | Con- | | |
| | | | | Se- | ser- | | |
| | | Po- | No. of | quence | van- | | SEQ |
| Pro- | | si- | Amino | Fre- | cy | | ID |
| tein | Sequence | tion | Acids | quency | (%) | A*0101 | NO. |

| | | | | | | | |
|---|---|---|---|---|---|---|---|
| ENV | IGSGQAFY | 361 | 8 | 01 | 25 | | 8176 |
| ENV | GKDLWVTVY | 42 | 9 | 01 | 33 | | 8177 |
| ENV | GKDLWVTVYY | 42 | 10 | 01 | 33 | | 8178 |
| ENV | NTSPRSRVAY | 376 | 10 | 01 | 33 | | 8179 |
| ENV | GTAGNSSRAA | 375 | 11 | 01 | 33 | | 8180 |
| ENV | DSSNSTGNY | 218 | 9 | 01 | 20 | | 8181 |
| ENV | TNSSYTNDTY | 458 | 10 | 01 | 17 | | 8182 |
| ENV | WFDITNWLW | 767 | 10 | 10 | 16 | | 8183 |
| ENV | WMEWEREIDN | 723 | 11 | 10 | 16 | | 8184 |
| ENV | EWERLIDNY | 725 | 9 | 11 | 17 | | 8185 |
| ENV | NMWQEVGKA | 494 | 11 | 15 | 23 | | 8186 |
| ENV | IISFNCRGEFFY | 434 | 11 | 16 | 25 | | 8187 |
| ENV | WQEVGKAMY | 496 | 9 | 18 | 28 | | 8188 |
| ENV | VSFEPIPIIIY | 253 | 10 | 28 | 44 | | 8189 |
| ENV | KVSFEPIPIIIY | 252 | 11 | 28 | 44 | | 8190 |
| ENV | SFEPIPIIIY | 254 | 9 | 31 | 48 | | 8191 |
| ENV | LQARVLAVER | 662 | 11 | 33 | 52 | | 8192 |
| ENV | LSIVNRVRQGY | 797 | 11 | 34 | 53 | | 8193 |
| ENV | RSLCLFSY | 858 | 8 | 35 | 55 | | 8194 |
| ENV | LRSLCLFSY | 857 | 9 | 35 | 55 | | 8195 |
| ENV | IISFNCGGEFFY | 434 | 11 | 35 | 55 | | 8196 |
| ENV | DMRDNWRSEL | 552 | 11 | 37 | 58 | | 8197 |
| ENV | MRDNWRSELY | 553 | 10 | 40 | 63 | 0.0010 | 8198 |
| ENV | CASDAKAY | 67 | 8 | 42 | 66 | | 8199 |
| ENV | FCASDAKAY | 66 | 9 | 42 | 66 | | 8200 |
| ENV | WRSELYKY | 557 | 8 | 54 | 84 | | 8201 |
| GAG | ETIDKDLY | 537 | 8 | 01 | 25 | | 8202 |
| GAG | EKEEKGLY | 538 | 8 | 01 | 25 | | 8203 |
| GAG | KQEPIDKELY | 535 | 10 | 01 | 25 | | 8204 |
| GAG | KQETIDKDLY | 535 | 10 | 01 | 25 | | 8205 |
| GAG | AADKGVSQNY | 130 | 10 | 01 | 50 | | 8206 |
| GAG | ASAQQDLKGG | 392 | 11 | 01 | 50 | | 8207 |
| GAG | ATAQQDLKGG | 392 | 11 | 01 | 50 | | 8208 |
| GAG | AADKGKVSQN | 129 | 11 | 02 | 18 | | 8209 |
| GAG | EADGKVSQNY | 129 | 10 | 04 | 36 | | 8210 |
| GAG | GNSSQVSQNY | 140 | 10 | 12 | 23 | | 8211 |
| GAG | KQEPIDKELY | 531 | 10 | 12 | 19 | | 8212 |
| GAG | SEELRSLY | 74 | 8 | 12 | 19 | | 8213 |
| GAG | GSEELRSLY | 73 | 9 | 12 | 19 | | 8214 |
| GAG | TGSEELRSLY | 72 | 10 | 12 | 19 | | 8215 |
| GAG | NSSQVSQNY | 144 | 9 | 14 | 31 | | 8216 |
| GAG | SSQVSQNY | 145 | 8 | 15 | 31 | | 8217 |
| GAG | RSLYNTVATL | 78 | 11 | 15 | 24 | | 8218 |
| GAG | FRDYVDRFY | 317 | 9 | 29 | 45 | 0.0900 | 8219 |
| GAG | PKEPFRDY | 313 | 8 | 63 | 98 | | 8220 |
| NEF | IIMARELIIPEY | 320 | 10 | 10 | 16 | | 8221 |
| NEF | IIMARELIIPEY | 320 | 11 | 10 | 16 | | 8222 |
| NEF | ARELIIPEFY | 322 | 9 | 11 | 17 | | 8223 |
| NEF | YTPGPGIRY | 207 | 9 | 17 | 27 | | 8224 |
| NEF | RQDILDLWVY | 182 | 10 | 20 | 31 | | 8225 |
| NEF | ARELHPEVY | 322 | 9 | 21 | 33 | | 8226 |
| NEF | ARELHPEY | 322 | 8 | 24 | 38 | | 8227 |
| NEF | RQEILDLWVY | 182 | 10 | 32 | 50 | | 8228 |
| POL | TWETWWTDY | 589 | 9 | 10 | 16 | | 8229 |
| POL | TWETWWTEY | 589 | 9 | 10 | 16 | | 8230 |
| POL | ETWETWWTD | 588 | 10 | 10 | 16 | | 8231 |
| POL | ETWETWWTE | 588 | 10 | 10 | 16 | | 8232 |
| POL | AQEDHEKY | 760 | 8 | 11 | 17 | | 8233 |
| POL | ISRIGPENPY | 236 | 10 | 11 | 17 | | 8234 |
| POL | KISRIGPENPY | 235 | 11 | 11 | 17 | | 8235 |
| POL | STNNETPGIRY | 323 | 11 | 11 | 17 | | 8236 |
| POL | KTELQAIY | 668 | 8 | 12 | 19 | | 8237 |
| POL | GQDQWTYQIY | 525 | 10 | 12 | 19 | | 8238 |
| POL | DKAQEEHERY | 758 | 10 | 15 | 23 | | 8239 |
| POL | AQEEIIERY | 760 | 8 | 16 | 25 | | 8240 |
| POL | NPDIVIYQY | 364 | 9 | 17 | 27 | 0.0011 | 8241 |
| POL | PLDKDFRKY | 308 | 9 | 19 | 30 | | 8242 |
| POL | QQEFGIPY | 888 | 8 | 20 | 32 | | 8243 |
| POL | NPEIVIYQY | 364 | 9 | 23 | 36 | | 8244 |
| POL | DKAQEEIIEKY | 758 | 10 | 25 | 39 | | 8245 |
| POL | AQEEIIEKY | 760 | 8 | 27 | 42 | | 8246 |
| POL | KQEFGIPY | 888 | 8 | 28 | 44 | | 8247 |
| POL | NRETKLGKAG | 639 | 11 | 28 | 44 | | 8248 |
| POL | ETKLGKAGY | 641 | 9 | 35 | 55 | 0.0010 | 8249 |
| POL | ITKIQNFRVY | 969 | 10 | 36 | 57 | 0.0010 | 8250 |
| POL | ITKIQNFRVYY | 969 | 11 | 36 | 57 | 0.0110 | 8251 |
| POL | LKEPVHGVYY | 502 | 10 | 39 | 61 | 0.0010 | 8252 |
| POL | LKEPVHGVY | 502 | 9 | 41 | 64 | 0.0007 | 8253 |
| POL | RKAKIIRDY | 1016 | 9 | 41 | 64 | | 8254 |
| POL | KISKIGPENPY | 235 | 11 | 41 | 64 | | 8255 |
| POL | ISKIGPENPY | 236 | 10 | 42 | 66 | 0.0130 | 8256 |
| POL | NNETPGIRY | 325 | 9 | 51 | 80 | 0.0007 | 8257 |
| POL | NNETPGIRYQY | 325 | 11 | 51 | 80 | 0.0004 | 8258 |
| POL | ETPGIRYQY | 327 | 9 | 52 | 81 | 0.0052 | 8259 |
| POL | LVAVIIVASGY | 826 | 10 | 53 | 83 | 0.0390 | 8260 |
| POL | VTVLDVGDAY | 295 | 10 | 56 | 88 | 0.2800 | 8261 |
| POL | NTPPLVKLWY | 610 | 10 | 57 | 89 | 0.0041 | 8262 |
| POL | PAETGQETAY | 842 | 10 | 58 | 91 | 0.0130 | 8263 |
| POL | IPAETGQETAY | 841 | 11 | 58 | 91 | | 8264 |
| POL | IETGQETAY | 844 | 8 | 59 | 92 | | 8265 |
| POL | VLDVGDAY | 297 | 8 | 60 | 94 | | 8266 |
| POL | QKEPPFLWMG | 411 | 11 | 63 | 98 | 0.0004 | 8267 |
| VIF | GVSIEWRLRR | 87 | 11 | 10 | 16 | | 8268 |
| VIF | SIEWRLRRY | 89 | 9 | 11 | 17 | | 8269 |
| VIF | VSIEWRLRRY | 88 | 10 | 11 | 17 | | 8270 |
| VIF | GLADQLIHMH | 106 | 11 | 11 | 17 | | 8271 |
| VIF | LADQLIHMHY | 107 | 10 | 13 | 20 | | 8272 |
| VIF | IVSPRCEY | 133 | 8 | 14 | 22 | | 8273 |
| VIF | LADQLIHLYY | 107 | 10 | 14 | 22 | | 8274 |
| VIF | LADQLIIILY | 107 | 9 | 15 | 23 | | 8275 |
| VIF | KSLVKHIIMY | 22 | 9 | 18 | 28 | | 8276 |
| VIF | WKSLVKIIIIM | 21 | 10 | 18 | 28 | | 8277 |
| VIF | NSLVKIIHMY | 22 | 9 | 24 | 38 | | 8278 |
| VIF | WNSLVKHIIM | 21 | 10 | 24 | 38 | | 8279 |
| VPR | PEDQGPQREPY | 5 | 11 | 37 | 58 | | 8280 |
| VPU | WTIVFIEY | 34 | 8 | 12 | 19 | | 8281 |

[0396] TABLE XVI

+UZ,/37 HIV A03 Motif Peptides with Binding Information

| | | | | | | | |
|---|---|---|---|---|---|---|---|
| | | | No. of | | | | SEQ |
| | | | Amino | Sequence | Conservancy | | ID |
| Protein | Sequence | Position | Acids | Frequency | (%) | A0301 | NO. |

| | | | | | | | |
|---|---|---|---|---|---|---|---|
| ENV | GIGPGQTF | 360 | 8 | 01 | 33 | | 8282 |
| ENV | SIGSGQAF | 360 | 8 | 01 | 33 | | 8283 |
| ENV | IGPGQTFY | 361 | 8 | 01 | 25 | | 8284 |
| ENV | IGSGQAFY | 361 | 8 | 01 | 25 | | 8285 |
| ENV | GTAGNSSR | 375 | 8 | 01 | 33 | | 8286 |
| ENV | TAGNSSRA | 376 | 8 | 01 | 33 | | 8287 |
| ENV | KLREIRQF | 405 | 8 | 01 | 25 | | 8288 |
| ENV | ADNLWVTVY | 42 | 9 | 01 | 33 | | 8289 |
| ENV | GIGPGQTFY | 360 | 9 | 01 | 33 | | 8290 |
| ENV | SIGSGQAFY | 360 | 9 | 01 | 33 | | 8291 |
| ENV | IGPGQTFYA | 361 | 9 | 01 | 25 | | 8292 |
| ENV | GTAGNSSRA | 375 | 9 | 01 | 33 | | 8293 |
| ENV | NTSPRSRVA | 376 | 9 | 01 | 33 | | 8294 |
| ENV | TAGNSSRAA | 376 | 9 | 01 | 33 | | 8295 |
| ENV | ADNLWVTVYY | 42 | 10 | 01 | 33 | | 8296 |
| ENV | EGKNEINDTY | 217 | 10 | 01 | 33 | | 8297 |
| ENV | GIGPGQTFYA | 360 | 10 | 01 | 33 | | 8298 |
| ENV | GTAGNSSRAA | 375 | 10 | 01 | 33 | | 8299 |
| ENV | NTSPRSRVAY | 376 | 10 | 01 | 33 | | 8300 |
| ENV | TAGNSSRAAY | 376 | 10 | 01 | 33 | | 8301 |
| ENV | FGLGALFLGF | 597 | 10 | 01 | 33 | | 8302 |
| ENV | VGLGAVFLGF | 597 | 10 | 01 | 33 | | 8303 |
| ENV | GTAGNSSRAA | 375 | 11 | 01 | 33 | | 8304 |
| ENV | KLREIRQFENK | 405 | 11 | 01 | 25 | | 8305 |
| ENV | QLYATVYA | 34 | 8 | 01 | 50 | | 8306 |
| ENV | IINIHTPH | 584 | 8 | 01 | 50 | | 8307 |
| ENV | VISTRTHR | 584 | 8 | 01 | 50 | | 8308 |
| ENV | STRTHREK | 586 | 8 | 01 | 50 | | 8309 |
| ENV | NANITIPCR | 478 | 9 | 01 | 50 | | 8310 |
| ENV | IINIHTPIIR | 584 | 9 | 01 | 50 | | 8311 |
| ENV | ISTRTIIREK | 585 | 9 | 01 | 50 | | 8312 |
| ENV | NIIITPHREK | 586 | 9 | 01 | 50 | | 8313 |
| ENV | STRTHREKR | 586 | 9 | 01 | 50 | | 8314 |
| ENV | VISTRTIIREK | 584 | 10 | 01 | 50 | | 8315 |
| ENV | ISTRTIIREKR | 585 | 10 | 01 | 50 | | 8316 |
| ENV | NIHTPHREKR | 586 | 10 | 01 | 50 | | 8317 |
| ENV | STRTHREKRA | 586 | 10 | 01 | 50 | | 8318 |
| ENV | IITEGNITLQCR | 478 | 11 | 01 | 50 | | 8319 |
| ENV | NANITIPCRIK | 478 | 11 | 01 | 50 | | 8320 |
| ENV | IINIHTPHREK | 584 | 11 | 01 | 50 | | 8321 |
| ENV | VISTRTHREKR | 584 | 11 | 01 | 50 | | 8322 |
| ENV | ISTRTHREKRA | 585 | 11 | 01 | 50 | | 8323 |
| ENV | NIHTPHREKRA | 586 | 11 | 01 | 50 | | 8324 |
| ENV | VTSTGNSA | 161 | 8 | 01 | 20 | | 8325 |
| ENV | DSSNSTGNY | 218 | 9 | 01 | 20 | | 8326 |
| ENV | STNGTETF | 537 | 8 | 01 | 17 | | 8327 |
| ENV | STNGTETFR | 537 | 9 | 01 | 17 | | 8328 |
| ENV | NDTENNTEIF | 537 | 10 | 01 | 17 | | 8329 |
| ENV | NTETNKTETF | 537 | 10 | 01 | 17 | | 8330 |
| ENV | NTTGNTTETF | 537 | 10 | 01 | 17 | | 8331 |
| ENV | NDTENNTEIFR | 537 | 11 | 01 | 17 | | 8332 |
| ENV | NTETNKTETF | 537 | 11 | 01 | 17 | | 8333 |
| ENV | NTTGNTTETF | 537 | 11 | 01 | 17 | | 8334 |
| ENV | NGSENGTETF | 537 | 10 | 02 | 33 | | 8335 |
| ENV | NGSENGTETF | 537 | 11 | 02 | 33 | | 8336 |
| ENV | GSENGTETF | 538 | 9 | 02 | 18 | | 8337 |
| ENV | GSENGTETFR | 538 | 10 | 02 | 18 | | 8338 |
| ENV | TIGAMFLGF | 599 | 9 | 03 | 27 | | 8339 |
| ENV | NDTITLPCR | 477 | 9 | 03 | 20 | | 8340 |
| ENV | NDTITLPCRIK | 477 | 11 | 03 | 20 | | 8341 |
| ENV | MLGAMFLGF | 599 | 9 | 04 | 36 | | 8342 |
| ENV | RGWEALKY | 895 | 8 | 06 | 19 | | 8343 |
| ENV | KGLRLGWEGL | 891 | 11 | 08 | 27 | | 8344 |
| ENV | LGWEGLKY | 895 | 8 | 09 | 29 | | 8345 |
| ENV | RLGWEGLKY | 894 | 9 | 09 | 29 | | 8346 |
| ENV | GLRLGWEGLK | 892 | 11 | 09 | 29 | | 8347 |
| ENV | LGRRGWEALK | 883 | 10 | 09 | 15 | | 8348 |
| ENV | LLGRRGWEAL | 882 | 11 | 09 | 15 | | 8349 |
| ENV | EIIGDIRQA | 372 | 9 | 09 | 15 | | 8350 |
| ENV | LILGLVIICSA | 21 | 11 | 09 | 15 | | 8351 |
| ENV | TGEIIGDIRQA | 370 | 11 | 09 | 15 | | 8352 |
| ENV | RLGWEGLK | 894 | 8 | 10 | 32 | | 8353 |
| ENV | GLRLGWEGLK | 892 | 10 | 10 | 32 | | 8354 |
| ENV | LGRRGWEA | 883 | 8 | 10 | 16 | | 8355 |
| ENV | LLGRRGWEA | 882 | 9 | 10 | 16 | | 8356 |
| ENV | DIIGDIRQAH | 372 | 10 | 10 | 16 | | 8357 |
| ENV | ELLGRRGWEA | 881 | 10 | 10 | 16 | | 8358 |
| ENV | TGDIIGDIRQA | 370 | 11 | 10 | 16 | | 8359 |
| ENV | GLVIICSA | 28 | 8 | 10 | 16 | | 8360 |
| ENV | RVGQAMYA | 498 | 8 | 10 | 16 | | 8361 |
| ENV | PLGVAPTR | 571 | 8 | 10 | 16 | | 8362 |
| ENV | LGVAPTRA | 572 | 8 | 10 | 16 | | 8363 |
| ENV | DITNWLWY | 769 | 8 | 10 | 16 | | 8364 |
| ENV | RDFILIAA | 869 | 8 | 10 | 16 | | 8365 |
| ENV | DFILIAAR | 870 | 8 | 10 | 16 | | 8366 |
| ENV | DTIAIAVA | 923 | 8 | 10 | 16 | | 8367 |
| ENV | LGLVIICSA | 27 | 9 | 10 | 16 | | 8368 |
| ENV | STITQACPK | 243 | 9 | 10 | 16 | | 8369 |
| ENV | IGPGQTFYA | 358 | 9 | 10 | 16 | | 8370 |
| ENV | FDITNWLWY | 768 | 9 | 10 | 16 | | 8371 |
| ENV | RDFILIAAR | 869 | 9 | 10 | 16 | | 8372 |
| ENV | NSAVSLLNA | 916 | 9 | 10 | 16 | | 8373 |
| ENV | ILGLVIICSA | 26 | 10 | 10 | 16 | | 8374 |
| ENV | LLGMLMICSA | 26 | 10 | 10 | 16 | | 8375 |
| ENV | PIHYCTPAGF | 260 | 10 | 10 | 16 | | 8376 |
| ENV | FAILKCNDKK | 269 | 10 | 10 | 16 | | 8377 |
| ENV | RIGPGQTFYA | 357 | 10 | 10 | 16 | | 8378 |
| ENV | MLQLTVWGIK | 651 | 10 | 10 | 16 | | 8379 |
| ENV | RVLAVERYLR | 665 | 10 | 10 | 16 | | 8380 |
| ENV | WFDITNWLW | 767 | 10 | 10 | 16 | | 8381 |
| ENV | EGIEEEGGER | 828 | 10 | 10 | 16 | | 8382 |
| ENV | PIIIYCTPAGFA | 260 | 11 | 10 | 16 | | 8383 |
| ENV | GFAILKCNDKK | 268 | 11 | 10 | 16 | | 8384 |
| ENV | FAILKCNDKKF | 269 | 11 | 10 | 16 | | 8385 |
| ENV | GDIIGDIRQAH | 371 | 11 | 10 | 16 | | 8386 |
| ENV | NVPWNSSWSN | 693 | 11 | 10 | 16 | | 8387 |
| ENV | WMEWEREIDN | 723 | 11 | 10 | 16 | | 8388 |
| ENV | NSAVSLLNAT | 916 | 11 | 10 | 16 | | 8389 |
| ENV | IAIAVAEGTDR | 925 | 11 | 10 | 16 | | 8390 |
| ENV | RGWEALKY | 886 | 8 | 11 | 18 | | 8391 |
| ENV | GIGAVFLGF | 598 | 9 | 11 | 18 | | 8392 |
| ENV | KLWVTVYY | 44 | 8 | 11 | 17 | | 8393 |
| ENV | AVGIGAVF | 595 | 8 | 11 | 17 | | 8394 |
| ENV | RAVGIGAVF | 594 | 9 | 11 | 17 | | 8395 |
| ENV | AVGIGAVFLGF | 595 | 11 | 11 | 17 | | 8396 |
| ENV | TITQACPK | 244 | 8 | 11 | 17 | | 8397 |
| ENV | YCTPAGFA | 263 | 8 | 11 | 17 | | 8398 |
| ENV | RIGPGQTF | 357 | 8 | 11 | 17 | | 8399 |
| ENV | IGPGQTFY | 358 | 8 | 11 | 17 | | 8400 |
| ENV | LFLGFLGA | 603 | 8 | 11 | 17 | | 8401 |
| ENV | LAVERYLR | 667 | 8 | 11 | 17 | | 8402 |
| ENV | NLCLFSYII | 859 | 8 | 11 | 17 | | 8403 |
| ENV | SAVSLLNA | 917 | 8 | 11 | 17 | | 8404 |
| ENV | VSLLNATA | 919 | 8 | 11 | 17 | | 8405 |
| ENV | LGMLMICSA | 27 | 9 | 11 | 17 | | 8406 |
| ENV | RIGPGQTFY | 357 | 9 | 11 | 17 | | 8407 |
| ENV | ITTHSFNCR | 431 | 9 | 11 | 17 | | 8408 |
| ENV | NITLPCRIK | 482 | 9 | 11 | 17 | | 8409 |
| ENV | ALFLGFLGA | 602 | 9 | 11 | 17 | | 8410 |
| ENV | LFLGFLGAA | 603 | 9 | 11 | 17 | | 8411 |
| ENV | VLAVERYLR | 666 | 9 | 11 | 17 | | 8412 |
| ENV | ISNWLWYIK | 770 | 9 | 11 | 17 | | 8413 |
| ENV | NLCLFSYIIR | 859 | 9 | 11 | 17 | | 8414 |
| ENV | AVSLLNATA | 918 | 9 | 11 | 17 | | 8415 |
| ENV | GDIIGDIRQA | 371 | 10 | 11 | 17 | | 8416 |
| ENV | EITTHSFNCR | 430 | 10 | 11 | 17 | | 8417 |
| ENV | VGIGAVFLGF | 596 | 10 | 11 | 17 | | 8418 |
| ENV | GALFLGFLGA | 601 | 10 | 11 | 17 | | 8419 |
| ENV | ALFLGFLGAA | 602 | 10 | 11 | 17 | | 8420 |
| ENV | SAVSLLNATA | 917 | 10 | 11 | 17 | | 8421 |
| ENV | VSLLNATAIA | 919 | 10 | 11 | 17 | | 8422 |
| ENV | YATGDIIGDIR | 368 | 11 | 11 | 17 | | 8423 |
| ENV | GALFLGFLGAA | 601 | 11 | 11 | 17 | | 8424 |
| ENV | ISNWLWYIKIF | 770 | 11 | 11 | 17 | | 8425 |
| ENV | DLRNLCLFSYH | 856 | 11 | 11 | 17 | | 8426 |
| ENV | NLCLFSYHRLR | 859 | 11 | 11 | 17 | | 8427 |
| ENV | AVSLLNATAIA | 918 | 11 | 11 | 17 | | 8428 |
| ENV | PTRIRQGLERA | 951 | 11 | 11 | 17 | | 8429 |
| ENV | TGDIIGDIR | 370 | 9 | 12 | 19 | | 8430 |
| ENV | DIIGDIRQA | 372 | 9 | 12 | 19 | | 8431 |
| ENV | EAQQIILLK | 646 | 8 | 12 | 19 | | 8432 |
| ENV | GMLMICSA | 28 | 8 | 12 | 19 | | 8433 |
| ENV | ILKCNDKK | 271 | 8 | 12 | 19 | | 8434 |
| ENV | TTHSFNCR | 432 | 8 | 12 | 19 | | 8435 |
| ENV | IGAVFLGF | 600 | 8 | 12 | 19 | | 8436 |
| ENV | MTWMEWER | 721 | 8 | 12 | 19 | | 8437 |
| ENV | GGERDRDR | 834 | 8 | 12 | 19 | | 8438 |
| ENV | AILKCNDKK | 270 | 9 | 12 | 19 | | 8439 |
| ENV | ILKCNDKKF | 271 | 9 | 12 | 19 | | 8440 |
| ENV | LAEEEVVIR | 312 | 9 | 12 | 19 | 0.0002 | 8441 |
| ENV | AMFLGFLGA | 602 | 9 | 12 | 19 | | 8442 |
| ENV | NMTWMEWER | 720 | 9 | 12 | 19 | | 8443 |
| ENV | GIEEEGGER | 829 | 9 | 12 | 19 | | 8444 |
| ENV | EGGERDRDR | 833 | 9 | 12 | 19 | | 8445 |
| ENV | RSIRLVNGF | 841 | 9 | 12 | 19 | | 8446 |
| ENV | WGQELKNSA | 910 | 9 | 12 | 19 | | 8447 |
| ENV | WSQELKNSA | 910 | 9 | 12 | 19 | | 8448 |
| ENV | KTTLFCASDA | 60 | 10 | 12 | 19 | | 8449 |
| ENV | AILKCNDKKF | 270 | 10 | 12 | 19 | | 8450 |
| ENV | SLAEEEVVIR | 311 | 10 | 12 | 19 | | 8451 |
| ENV | ATGDIIGDIR | 369 | 10 | 12 | 19 | | 8452 |
| ENV | IINMWQEVGK | 492 | 10 | 12 | 19 | | 8453 |
| ENV | GAMFLGFLGA | 601 | 10 | 12 | 19 | | 8454 |
| ENV | AMFLGFLGAA | 602 | 10 | 12 | 19 | | 8455 |
| ENV | AIEAQQHLLK | 644 | 10 | 12 | 19 | | 8456 |
| ENV | QDLLALDKWA | 753 | 10 | 12 | 19 | | 8457 |
| ENV | SIRLVSGFLA | 842 | 10 | 12 | 19 | | 8458 |
| ENV | LLQYWSQELK | 906 | 10 | 12 | 19 | | 8459 |
| ENV | AILHIPRRIR | 946 | 10 | 12 | 19 | | 8460 |
| ENV | PTRIRQGLER | 951 | 10 | 12 | 19 | | 8461 |
| ENV | KTTLFCASDA | 60 | 11 | 12 | 19 | | 8462 |
| ENV | GSLAEEEVVIR | 310 | 11 | 12 | 19 | | 8463 |
| ENV | TTIISFNCRGE | 432 | 11 | 12 | 19 | | 8464 |
| ENV | QIINMWQEVG | 491 | 11 | 12 | 19 | | 8465 |
| ENV | IINMWQEVGK | 492 | 11 | 12 | 19 | | 8466 |
| ENV | GAMFLGFLGA | 601 | 11 | 12 | 19 | | 8467 |
| ENV | ITKWLWYIKIF | 770 | 11 | 12 | 19 | | 8468 |
| ENV | GIEEEGGERDR | 829 | 11 | 12 | 19 | | 8469 |
| ENV | RSIRLVSGFLA | 841 | 11 | 12 | 19 | | 8470 |
| ENV | NLLQYWSQEL | 905 | 11 | 12 | 19 | | 8471 |
| ENV | RAILHIPRRIR | 945 | 11 | 12 | 19 | | 8472 |
| ENV | NTSVITQA | 241 | 8 | 13 | 20 | | 8473 |
| ENV | SVEINCTR | 340 | 8 | 13 | 20 | | 8474 |
| ENV | GDIIGDIR | 371 | 8 | 13 | 20 | | 8475 |
| ENV | MFLGFLGA | 603 | 8 | 13 | 20 | | 8476 |
| ENV | KLTVWGIK | 653 | 8 | 13 | 20 | | 8477 |
| ENV | SIRLVNGF | 842 | 8 | 13 | 20 | | 8478 |
| ENV | SIRLVSGF | 842 | 8 | 13 | 20 | | 8479 |
| ENV | RLVNGFLA | 844 | 8 | 13 | 20 | | 8480 |
| ENV | RAILHIPR | 945 | 8 | 13 | 20 | | 8481 |
| ENV | AILIIIPRR | 946 | 8 | 13 | 20 | | 8482 |
| ENV | KAKRRVVQR | 579 | 9 | 13 | 20 | 0.0002 | 8483 |
| ENV | MFLGFLGAA | 603 | 9 | 13 | 20 | | 8484 |
| ENV | RSIRLVSGF | 841 | 9 | 13 | 20 | | 8485 |
| ENV | RAILIIIPRR | 945 | 9 | 13 | 20 | | 8486 |
| ENV | ILIIIPRRIR | 947 | 9 | 13 | 20 | | 8487 |
| ENV | SGGDPEIVMH | 425 | 10 | 13 | 20 | | 8488 |
| ENV | LLKLTVWGIK | 651 | 10 | 13 | 20 | | 8489 |
| ENV | NTSVITQACPK | 241 | 11 | 13 | 20 | | 8490 |
| ENV | CTNVSTVQCT | 285 | 11 | 13 | 20 | | 8491 |
| ENV | SSGGDLEITTH | 424 | 11 | 13 | 20 | | 8492 |
| ENV | SSGGDPEIVMII | 424 | 11 | 13 | 20 | | 8493 |
| ENV | VMHSFNCGGE | 432 | 11 | 13 | 20 | | 8494 |
| ENV | PTKAKRRVVQ | 576 | 11 | 13 | 20 | | 8495 |
| ENV | KAKRRVVQRE | 579 | 11 | 13 | 20 | | 8496 |
| ENV | IILLKLTVWGI | 650 | 11 | 13 | 20 | | 8497 |
| ENV | VGGLIGLRIIF | 784 | 11 | 13 | 20 | | 8498 |
| ENV | SLLNATAIAVA | 920 | 11 | 13 | 20 | | 8499 |
| ENV | TGEIIGDIR | 370 | 9 | 14 | 23 | | 8500 |
| ENV | NTSAITQA | 241 | 8 | 14 | 22 | | 8501 |
| ENV | AITQACPK | 244 | 8 | 14 | 22 | | 8502 |
| ENV | GDPEIVMII | 427 | 8 | 14 | 22 | | 8503 |
| ENV | QDLLALDK | 753 | 8 | 14 | 22 | | 8504 |
| ENV | NATAIAVA | 923 | 8 | 14 | 22 | | 8505 |
| ENV | SAITQACPK | 243 | 9 | 14 | 22 | | 8506 |
| ENV | FAILKCNDK | 269 | 9 | 14 | 22 | 0.0002 | 8507 |
| ENV | GGDPEIVMH | 426 | 9 | 14 | 22 | | 8508 |
| ENV | TITLPCRIK | 482 | 9 | 14 | 22 | | 8509 |
| ENV | SLLNATAIA | 920 | 9 | 14 | 22 | | 8510 |
| ENV | NCNTSAITQA | 239 | 10 | 14 | 22 | | 8511 |
| ENV | TSAITQACPK | 242 | 10 | 14 | 22 | | 8512 |
| ENV | TSVITQACPK | 242 | 10 | 14 | 22 | | 8513 |
| ENV | GFAILKCNDK | 268 | 10 | 14 | 22 | | 8514 |
| ENV | GDPEIVMHSF | 427 | 10 | 14 | 22 | | 8515 |
| ENV | IFAVLSIVNR | 793 | 10 | 14 | 22 | | 8516 |
| ENV | LLNATAIAVA | 921 | 10 | 14 | 22 | | 8517 |
| ENV | NTSAITQACPK | 241 | 11 | 14 | 22 | | 8518 |
| ENV | VITQACPKVSF | 244 | 11 | 14 | 22 | | 8519 |
| ENV | AGFAILKCNDK | 267 | 11 | 14 | 22 | | 8520 |
| ENV | GGDPEIVMIISF | 426 | 11 | 14 | 22 | | 8521 |
| ENV | ITNWLWYIKIF | 770 | 11 | 14 | 22 | | 8522 |
| ENV | IIFAVLSIVNR | 792 | 11 | 14 | 22 | | 8523 |
| ENV | KIEPLGVAPTK | 568 | 11 | 15 | 24 | | 8524 |
| ENV | FDPIPIHY | 255 | 8 | 15 | 23 | | 8S25 |
| ENV | PAGYAILK | 266 | 8 | 15 | 23 | | 8526 |
| ENV | NMWQEVGK | 494 | 8 | 15 | 23 | | 8527 |
| ENV | LLNATAIA | 921 | 8 | 15 | 23 | | 8528 |
| ENV | NMWQEVGKA | 494 | 9 | 15 | 23 | | 8529 |
| ENV | DLLALDKWA | 754 | 9 | 15 | 23 | | 8530 |
| ENV | ITNWLWYIK | 770 | 9 | 15 | 23 | | 8531 |
| ENV | GLIGLRIIF | 786 | 9 | 15 | 23 | | 8532 |
| ENV | DDLRNLCLF | 855 | 9 | 15 | 23 | | 8533 |
| ENV | SGGDLEITTH | 425 | 10 | 15 | 23 | | 8534 |
| ENV | IFRPGGGDMR | 545 | 10 | 15 | 23 | | 8535 |
| ENV | GGLIGLRIIF | 785 | 10 | 15 | 23 | | 8536 |
| ENV | GLICLRIIFA | 786 | 10 | 15 | 23 | | 8537 |
| ENV | WDDLRNLCLF | 854 | 10 | 15 | 23 | | 8538 |
| ENV | NMWQEVGKA | 494 | 11 | 15 | 23 | | 8539 |
| ENV | EIFRPGGGDMR | 544 | 11 | 15 | 23 | | 8540 |
| ENV | GGLIGLRIIFA | 785 | 11 | 15 | 23 | | 8541 |
| ENV | DDLRNLCLFSY | 855 | 11 | 15 | 23 | | 8542 |
| ENV | SFNCRGEF | 437 | 8 | 16 | 25 | | 8543 |
| ENV | LIGLRIIF | 787 | 8 | 16 | 25 | | 8544 |
| ENV | VSGFLALA | 846 | 8 | 16 | 25 | | 8545 |
| ENV | HSFNCRGEF | 434 | 9 | 16 | 25 | | 8546 |
| ENV | SFNCRGEFF | 437 | 9 | 16 | 25 | | 8547 |
| ENV | ITKWLWYIK | 770 | 9 | 16 | 25 | | 8548 |
| ENV | LIGLRIIFA | 787 | 9 | 16 | 25 | | 8549 |
| ENV | LVSGFLALA | 845 | 9 | 16 | 25 | | 8550 |
| ENV | IISFNCRGEFE | 434 | 10 | 16 | 25 | | 8551 |
| ENV | SFNCRGEFFY | 437 | 10 | 16 | 25 | | 8552 |
| ENV | RLVSGFLALA | 844 | 10 | 16 | 25 | | 8553 |
| ENV | DLRNLCLFSY | 856 | 10 | 16 | 25 | | 8554 |
| ENV | TTIISFNCGGE | 432 | 11 | 16 | 25 | | 8555 |
| ENV | IISFNCRGEFFY | 434 | 11 | 16 | 25 | | 8556 |
| ENV | RLINCNTSA | 236 | 9 | 17 | 27 | | 8557 |
| ENV | KAYDTEVH | 72 | 8 | 17 | 27 | | 8558 |
| ENV | LINCNTSA | 237 | 8 | 17 | 27 | | 8559 |
| ENV | VITQACPK | 244 | 8 | 17 | 27 | | 8560 |
| ENV | RVVQREKR | 587 | 8 | 17 | 27 | 0.0003 | 8561 |
| ENV | VVQREKRA | 588 | 8 | 17 | 27 | | 8562 |
| ENV | IGLRIIFA | 788 | 8 | 17 | 27 | | 8563 |
| ENV | DLRNLCLF | 856 | 8 | 17 | 27 | | 8564 |
| ENV | SVITQACPK | 243 | 9 | 17 | 27 | | 8565 |
| ENV | VAPTKAKRR | 574 | 9 | 17 | 27 | 0.0002 | 8566 |
| ENV | RVVQREKRA | 587 | 9 | 17 | 27 | | 8567 |
| ENV | DAKAYDTEVII | 70 | 10 | 17 | 27 | | 8568 |
| ENV | YDTEVIINVWA | 74 | 10 | 17 | 27 | | 8569 |
| ENV | GVAPTKAKRR | 573 | 10 | 17 | 27 | | 8570 |
| ENV | VFAVLSIVNR | 793 | 10 | 17 | 27 | | 8571 |
| ENV | SDAKAYDTEV | 69 | 11 | 17 | 27 | | 8572 |
| ENV | DTEVHNVWAT | 75 | 11 | 17 | 27 | | 8573 |
| ENV | NCTRPNNNTR | 344 | 11 | 17 | 27 | | 8574 |
| ENV | LGVAPTKAKR | S72 | 11 | 17 | 27 | | 8575 |
| ENV | IVFAVLSIVNR | 792 | 11 | 17 | 27 | | 8576 |
| ENV | PIHYCTPA | 260 | 8 | 18 | 28 | | 8577 |
| ENV | EVGKAMYA | 498 | 8 | 18 | 28 | | 8578 |
| ENV | DTEVIINVWA | 75 | 9 | 18 | 28 | | 8579 |
| ENV | VLAVERYLK | 666 | 9 | 18 | 28 | | 8580 |
| ENV | ELLELDKWA | 754 | 9 | 18 | 28 | | 8581 |
| ENV | FSYIIRLRDF | 863 | 9 | 18 | 28 | | 8582 |
| ENV | PIPIIIYCTPA | 258 | 10 | 18 | 28 | | 8583 |
| ENV | RVLAVERYLK | 665 | 10 | 18 | 28 | | 8584 |
| ENV | LFSYHRLRDF | 862 | 10 | 18 | 28 | | 8585 |
| ENV | CLFSYHRLRDF | 861 | 11 | 18 | 28 | | 8586 |
| ENV | NCRGEFFY | 439 | 8 | 19 | 30 | | 8587 |
| ENV | GVAPTKAK | 573 | 8 | 19 | 30 | | 8588 |
| ENV | VAPTKAKR | 574 | 8 | 19 | 30 | | 8589 |
| ENV | VFLGFLGA | 603 | 8 | 19 | 30 | | 8590 |
| ENV | LLALDKWA | 755 | 8 | 19 | 30 | | 8591 |
| ENV | LGVAPTKAK | 572 | 9 | 19 | 30 | | 8592 |
| ENV | GVAPTKAKR | 573 | 9 | 19 | 30 | | 8593 |
| ENV | AVFLGFLGA | 602 | 9 | 19 | 30 | | 8594 |
| ENV | VFLGFLGAA | 603 | 9 | 19 | 30 | | 8595 |
| ENV | SGKLICTTA | 685 | 9 | 19 | 30 | | 8596 |
| ENV | PLGVAPTKAK | 571 | 10 | 19 | 30 | | 8597 |
| ENV | LGVAPTKAKR | 572 | 10 | 19 | 30 | | 8598 |
| ENV | GAVFLGFLGA | 601 | 10 | 19 | 30 | | 8599 |
| ENV | AVFLGFLGAA | 602 | 10 | 19 | 30 | | 8600 |
| ENV | CSGKLICTTA | 684 | 10 | 19 | 30 | | 8601 |
| ENV | SSNITGLLLTR | 516 | 11 | 19 | 30 | | 8602 |
| ENV | PLGVAPTKAK | 571 | 11 | 19 | 30 | | 8603 |
| ENV | GAVFLGFLGA | 601 | 11 | 19 | 30 | | 8604 |
| ENV | GCSGKLICTTA | 683 | 11 | 19 | 30 | | 8605 |
| ENV | AILKCNDK | 270 | 8 | 20 | 31 | | 8606 |
| ENV | RLVSGFLA | 844 | 8 | 20 | 31 | | 8607 |
| ENV | ETFRPGGGDM | 544 | 11 | 20 | 31 | | 8608 |
| ENV | LIEESQNQQEK | 740 | 11 | 20 | 31 | | 8609 |
| ENV | GDLEITTII | 427 | 8 | 21 | 33 | | 8610 |
| ENV | YCNTSGLF | 446 | 8 | 21 | 33 | | 8611 |
| ENV | LLELDKWA | 755 | 8 | 21 | 33 | | 8612 |
| ENV | GGDLEITTH | 426 | 9 | 21 | 33 | | 8613 |
| ENV | DLEITTHSF | 428 | 9 | 21 | 33 | | 8614 |
| ENV | LIGLRIVFA | 787 | 9 | 21 | 33 | | 8615 |
| ENV | GDLEITTIISF | 427 | 10 | 21 | 33 | | 8616 |
| ENV | FFYCNTSGLF | 444 | 10 | 21 | 33 | | 8617 |
| ENV | GLIGLRIVFA | 786 | 10 | 21 | 33 | | 8618 |
| ENV | SFEPIPIIIYCA | 254 | 11 | 21 | 33 | | 8619 |
| ENV | GGDLEITTHSF | 426 | 11 | 21 | 33 | | 8620 |
| ENV | EFFYCNTSGLF | 443 | 11 | 21 | 33 | | 8621 |
| ENV | GGLIGLRIVFA | 785 | 11 | 21 | 33 | | 8622 |
| ENV | TAIAVAEGTDR | 925 | 11 | 21 | 33 | | 8623 |
| ENV | IGLRIVFA | 788 | 8 | 22 | 34 | | 8624 |
| ENV | RIVELLGR | 878 | 8 | 22 | 34 | | 8625 |
| ENV | IVELLGRR | 879 | 8 | 22 | 34 | | 8626 |
| ENV | RIVELLGRR | 878 | 9 | 22 | 34 | 0.0550 | 8627 |
| ENV | NCTRPNNNTR | 344 | 10 | 22 | 34 | | 8628 |
| ENV | CTRPNNNTRK | 345 | 10 | 22 | 34 | | 8629 |
| ENV | PVWKEATTTL | 54 | 11 | 22 | 34 | | 8630 |
| ENV | TTTLFCASDA | 60 | 11 | 22 | 34 | | 8631 |
| ENV | KIEPLGVA | 568 | 8 | 23 | 37 | | 8632 |
| ENV | LGVAPTKA | 572 | 8 | 23 | 36 | | 8633 |
| ENV | TVQCTIIGIR | 290 | 9 | 23 | 36 | 0.0008 | 8634 |
| ENV | PLGVAPTKA | 571 | 9 | 23 | 36 | | 8635 |
| ENV | STVQCTHGIR | 289 | 10 | 23 | 36 | | 8636 |
| ENV | VVKIEPLGVA | 566 | 10 | 23 | 36 | | 8637 |
| ENV | QSNLLRAIEA | 638 | 10 | 23 | 36 | | 8638 |
| ENV | ATTTLFCASD | 59 | 11 | 23 | 36 | | 8639 |
| ENV | VSTVQCTIIGIR | 288 | 11 | 23 | 36 | | 8640 |
| ENV | KVVKIEPLGVA | 565 | 11 | 23 | 36 | | 8641 |
| ENV | ATTTLFCA | 59 | 8 | 24 | 38 | | 8642 |
| ENV | EATTTLFCA | 58 | 9 | 24 | 38 | | 8643 |
| ENV | TTTLFCASDA | 60 | 10 | 24 | 38 | | 8644 |
| ENV | TFRPGGGDMR | 545 | 10 | 24 | 38 | | 8645 |
| ENV | ALAWDDLR | 851 | 8 | 25 | 39 | | 8646 |
| ENV | LALAWDDLR | 850 | 9 | 25 | 39 | | 8647 |
| ENV | IVQQQNNLLR | 634 | 10 | 25 | 39 | 0.0024 | 8648 |
| ENV | FLALAWDDLR | 849 | 10 | 25 | 39 | | 8649 |
| ENV | GIVQQQNNLLR | 633 | 11 | 25 | 39 | | 8650 |
| ENV | IVQQQNNLLRA | 634 | 11 | 25 | 39 | | 8651 |
| ENV | GFLALAWDDL | 848 | 11 | 25 | 39 | | 8652 |
| ENV | ITLPCRIK | 483 | 8 | 26 | 41 | | 8653 |
| ENV | PLGVAPTK | 571 | 8 | 26 | 41 | | 8654 |
| ENV | LAVERYLK | 667 | 8 | 26 | 41 | | 8655 |
| ENV | IVQQQSNLLR | 634 | 10 | 26 | 41 | | 8656 |
| ENV | GIVQQQSNLLR | 633 | 11 | 26 | 41 | | 8657 |
| ENV | IVQQQSNLLRA | 634 | 11 | 26 | 41 | | 8658 |
| ENV | LDKWASLWN | 758 | 11 | 26 | 41 | | 8659 |
| ENV | IIGDIRQAH | 377 | 9 | 27 | 44 | | 8660 |
| ENV | ESQNQQEK | 743 | 8 | 27 | 42 | | 8661 |
| ENV | PIIIYCAPAGF | 260 | 10 | 27 | 42 | | 8662 |
| ENV | PIIIYCAPAGFA | 260 | 11 | 27 | 42 | | 8663 |
| ENV | VGGLIGLRIVF | 784 | 11 | 27 | 42 | | 8664 |
| ENV | IGDIRQAII | 378 | 8 | 28 | 44 | | 8665 |
| ENV | YCAPAGFA | 263 | 8 | 28 | 44 | | 8666 |
| ENV | TVQCTIIGIK | 290 | 9 | 28 | 44 | 0.0021 | 8667 |
| ENV | CTRPNNNTR | 345 | 9 | 28 | 44 | | 8668 |
| ENV | ASITLTVQA | 619 | 9 | 28 | 44 | | 8669 |
| ENV | VSFEPIPIIIY | 253 | 10 | 28 | 44 | | 8670 |
| ENV | STVQCTIIGIK | 289 | 10 | 28 | 44 | | 8671 |
| ENV | AASITLTVQA | 618 | 10 | 28 | 44 | | 8672 |
| ENV | ASITLTVQAR | 619 | 10 | 28 | 44 | | 8673 |
| ENV | KVSFEPIPIHY | 252 | 11 | 28 | 44 | | 8674 |
| ENV | YCAPAGFAILK | 263 | 11 | 28 | 44 | | 8675 |
| ENV | VSTVQCTHGIK | 288 | 11 | 28 | 44 | | 8676 |
| ENV | GAASITLTVQA | 617 | 11 | 28 | 44 | | 8677 |
| ENV | AASITLTVQAR | 618 | 11 | 28 | 44 | | 8678 |
| ENV | LIGLRIVF | 787 | 8 | 29 | 45 | | 8679 |
| ENV | VSFEPIPIH | 253 | 9 | 29 | 45 | | 8680 |
| ENV | GLIGLRIVF | 786 | 9 | 29 | 45 | | 8681 |
| ENV | ITQACPKVSF | 245 | 10 | 29 | 45 | | 8682 |
| ENV | KVSFEPIPIII | 252 | 10 | 29 | 45 | | 8683 |
| ENV | CAPAGFAILK | 264 | 30 | 29 | 45 | | 8684 |
| ENV | GGLIGLRIVF | 785 | 30 | 29 | 45 | | 8685 |
| ENV | RSELYKYKVV | 558 | 11 | 29 | 45 | | 8686 |
| ENV | IIGDIRQA | 377 | 8 | 30 | 49 | | 8687 |
| ENV | WASLWNWF | 761 | 8 | 30 | 47 | | 8688 |
| ENV | AVLSIVNR | 795 | 8 | 31 | 48 | | 8689 |
| ENV | AVAEGTDR | 928 | 8 | 31 | 48 | | 8690 |
| ENV | VTENFNMWK | 102 | 9 | 31 | 48 | | 8691 |
| ENV | SPEPIPIIIY | 254 | 9 | 31 | 48 | | 8692 |
| ENV | FAVLSIVNR | 794 | 9 | 31 | 48 | | 8693 |
| ENV | SLCLFSYIIR | 859 | 9 | 31 | 48 | | 8694 |
| ENV | IAVAEGTDR | 927 | 9 | 31 | 48 | 0.0004 | 8695 |
| ENV | NVTENFNMW | 101 | 10 | 31 | 48 | | 8696 |
| ENV | AVLSIVNRVR | 795 | 10 | 31 | 48 | | 8697 |
| ENV | RSLCLFSYIIR | 858 | 10 | 31 | 48 | | 8698 |
| ENV | AIAVAEGTDR | 926 | 10 | 31 | 48 | | 8699 |
| ENV | FAVLSIVNRVR | 794 | 11 | 31 | 48 | | 8700 |
| ENV | DDLRSLCLFSY | 855 | 11 | 31 | 48 | | 8701 |
| ENV | SLCLFSYIIRLR | 859 | 11 | 31 | 48 | | 8702 |
| ENV | ELYKYKVVK | 560 | 9 | 32 | 51 | | 8703 |
| ENV | RVVEREKR | 587 | 8 | 32 | 50 | | 8704 |
| ENV | VVEREKRA | 588 | 8 | 32 | 50 | | 8705 |
| ENV | SITLTVQA | 620 | 8 | 32 | 50 | | 8706 |
| ENV | ITLTVQAR | 623 | 8 | 32 | 50 | | 8707 |
| ENV | SLCLFSYH | 859 | 8 | 32 | 50 | | 8708 |
| ENV | RVVEREKRA | 587 | 9 | 32 | 50 | | 8709 |
| ENV | SITLTVQAR | 620 | 9 | 32 | 50 | | 8710 |
| ENV | RSLCLFSYII | 858 | 9 | 32 | 50 | | 8711 |
| ENV | DLRSLCLFSYH | 856 | 11 | 32 | 50 | | 8712 |
| ENV | SFEPIPIII | 254 | 8 | 33 | 52 | | 8713 |
| ENV | RVLAVERY | 665 | 8 | 33 | 52 | | 8714 |
| ENV | QARVLAVER | 663 | 9 | 33 | 52 | 0.0009 | 8715 |
| ENV | DDLRSLCLF | 855 | 9 | 33 | 52 | | 8716 |
| ENV | QARVLAVERY | 663 | 10 | 33 | 52 | | 8717 |
| ENV | WDDLRSLCLF | 854 | 10 | 33 | 52 | | 8718 |
| ENV | QLQARVLAVE | 661 | 11 | 33 | 52 | | 8719 |
| ENV | IMIVGGLIGLR | 781 | 11 | 34 | 54 | | 8720 |
| ENV | GVPVWKEA | 52 | 8 | 34 | 53 | | 8721 |
| ENV | YGVPVWKEA | 51 | 9 | 34 | 53 | | 8722 |
| ENV | RIRQGLERA | 953 | 9 | 34 | 53 | | 8723 |
| ENV | LLQLTVWGIK | 651 | 10 | 34 | 53 | 0.0055 | 8724 |
| ENV | IILLQLTVWGI | 650 | 11 | 34 | 53 | | 8725 |
| ENV | LSIVNRVRQGY | 797 | 11 | 34 | 53 | | 8726 |
| ENV | NLWVTVYY | 44 | 8 | 35 | 56 | | 8727 |
| ENV | NCGGEFFY | 439 | 8 | 35 | 55 | | 8728 |
| ENV | RSLCLFSY | 858 | 8 | 35 | 55 | | 8729 |
| ENV | EVHNVWATH | 77 | 9 | 35 | 55 | | 8730 |
| ENV | SFNCGGEFF | 437 | 9 | 35 | 55 | | 8731 |
| ENV | NITGLLLTR | 519 | 9 | 35 | 55 | 0.0004 | 8732 |
| ENV | EVIINVWATIIA | 77 | 10 | 35 | 55 | | 8733 |
| ENV | IISFNCGGEFF | 434 | 10 | 35 | 55 | | 8734 |
| ENV | SFNCGGEFFY | 437 | 10 | 35 | 55 | | 8735 |
| ENV | DLRSLCLFSY | 856 | 10 | 35 | 55 | | 8736 |
| ENV | IISFNCGGEFFY | 434 | 11 | 35 | 55 | | 8737 |
| ENV | SFNCGGEF | 437 | 8 | 36 | 56 | | 8738 |
| ENV | IISFNCGGEF | 434 | 9 | 36 | 56 | | 8739 |
| ENV | PIPIIIYCAPA | 258 | 10 | 36 | 56 | | 8740 |
| ENV | GGGDMRDNW | 549 | 10 | 36 | 56 | | 8741 |
| ENV | MIVGGLIGLR | 782 | 10 | 36 | 56 | | 8742 |
| ENV | SIVNRVRQGY | 798 | 10 | 36 | 56 | 0.0008 | 8743 |
| ENV | PGGGDMRDN | 548 | 11 | 36 | 56 | | 8744 |
| ENV | PIIIYCAPA | 260 | 8 | 37 | 58 | | 8745 |
| ENV | ITGLLLTR | 520 | 8 | 37 | 58 | | 8746 |
| ENV | DMRDNWRSEL | 552 | 11 | 37 | 58 | | 8747 |
| ENV | PAGFAILK | 266 | 8 | 38 | 59 | | 8748 |
| ENV | LSIVNRVR | 797 | 8 | 38 | 59 | | 8749 |
| ENV | DLRSLCLF | 856 | 8 | 38 | 59 | | 8750 |
| ENV | VLSIVNRVR | 796 | 9 | 38 | 59 | | 8751 |
| ENV | IVNRVRQGY | 799 | 9 | 38 | 59 | | 8752 |
| ENV | IISLWDQSLK | 121 | 10 | 38 | 59 | 0.0410 | 8753 |
| ENV | DIISLWDQSLK | 120 | 11 | 38 | 59 | | 8754 |
| ENV | GDMRDNWR | 551 | 8 | 39 | 61 | | 8755 |
| ENV | GGDMRDNWR | 550 | 9 | 39 | 61 | | 8756 |
| ENV | QACPKVSF | 248 | 8 | 40 | 63 | | 8757 |
| ENV | PIPIHYCA | 258 | 8 | 40 | 63 | | 8758 |
| ENV | RDNWRSELY | 554 | 9 | 40 | 63 | 0.0003 | 8759 |
| ENV | RDNWRSELYK | 554 | 10 | 40 | 63 | 0.0008 | 8760 |
| ENV | TLFCASDAKA | 64 | 11 | 40 | 63 | | 8761 |
| ENV | RDNWRSELYK | 554 | 11 | 40 | 63 | | 8762 |
| ENV | GIKQLQARVLA | 658 | 11 | 40 | 63 | | 8763 |
| ENV | QLQARVLA | 661 | 8 | 41 | 64 | | 8764 |
| ENV | TVYYGVPVWK | 48 | 10 | 41 | 64 | 3.8000 | 8765 |
| ENV | VTVYYGVPVW | 47 | 11 | 41 | 64 | 0.8600 | 8766 |
| ENV | CASDAKAY | 67 | 8 | 42 | 66 | | 8767 |
| ENV | LCLFSYIIR | 860 | 8 | 42 | 66 | | 8768 |
| ENV | FCASDAKAY | 66 | 9 | 42 | 66 | | 8769 |
| ENV | IVGGLIGLR | 783 | 9 | 42 | 66 | | 8770 |
| ENV | CLFSYIIRLR | 861 | 9 | 42 | 66 | | 8771 |
| ENV | LFCASDAKAY | 65 | 10 | 42 | 66 | 0.0004 | 8772 |
| ENV | GAAGSTMGAA | 610 | 10 | 42 | 66 | | 8773 |
| ENV | LCLFSYHRLR | 860 | 10 | 42 | 66 | | 8774 |
| ENV | LGAAGSTMGA | 609 | 11 | 42 | 66 | | 8775 |
| ENV | VGGLIGLR | 784 | 8 | 43 | 67 | | 8776 |
| ENV | QLTVWGIK | 653 | 8 | 44 | 69 | | 8777 |
| ENV | LFSYHRLR | 862 | 8 | 44 | 69 | | 8778 |
| ENV | RIRQGLER | 953 | 8 | 44 | 69 | | 8779 |
| ENV | TTLFCASDAK | 61 | 11 | 44 | 69 | | 8780 |
| ENV | AAGSTMGAA | 611 | 9 | 45 | 70 | | 8781 |
| ENV | TLFCASDAKA | 64 | 10 | 46 | 72 | | 8782 |
| ENV | SLWDQSLK | 123 | 8 | 47 | 75 | | 8783 |
| ENV | ISLWDQSLK | 122 | 9 | 47 | 73 | 0.0048 | 8784 |
| ENV | WDQSLKPCVK | 125 | 10 | 47 | 73 | | 8785 |
| ENV | RVRQGYSPLSF | 802 | 11 | 47 | 73 | | 8786 |
| ENV | QSLKPCVK | 127 | 8 | 48 | 75 | | 8787 |
| ENV | FLGFLGAA | 604 | 8 | 48 | 75 | | 8788 |
| ENV | QGYSPLSF | 805 | 8 | 48 | 75 | | 8789 |
| ENV | TVWGIKQLQA | 655 | 11 | 48 | 75 | | 8790 |
| ENV | GIKQLQAR | 658 | 8 | 49 | 77 | | 8791 |
| ENV | WGIKQLQAR | 657 | 9 | 49 | 77 | 0.0004 | 8792 |
| ENV | TVWGIKQLQA | 655 | 10 | 49 | 77 | | 8793 |
| ENV | LTVWGIKQLQ | 654 | 11 | 49 | 77 | | 8794 |
| ENV | FCASDAKA | 66 | 8 | 50 | 78 | | 8795 |
| ENV | AGSTMGAA | 612 | 8 | 50 | 78 | | 8796 |
| ENV | WLWYIKIF | 773 | 8 | 50 | 78 | | 8797 |
| ENV | LFCASDAKA | 65 | 9 | 50 | 78 | | 8798 |
| ENV | LGIWGCSGK | 679 | 9 | 50 | 78 | 0.0097 | 8799 |
| ENV | TTLFCASDAK | 61 | 10 | 50 | 78 | 0.0920 | 8800 |
| ENV | LLGIWGCSGK | 678 | 10 | 50 | 78 | 0.1200 | 8801 |
| ENV | NLLRAIEAQQII | 640 | 11 | 50 | 78 | | 8802 |
| ENV | QLLGIWGCSG | 677 | 11 | 50 | 78 | | 8803 |
| ENV | VSTVQCTII | 288 | 8 | 51 | 80 | | 8804 |
| ENV | NLLRAIEA | 640 | 8 | 51 | 80 | | 8805 |
| ENV | RAIEAQQH | 643 | 8 | 51 | 80 | | 8806 |
| ENV | WGIKQLQA | 657 | 8 | 51 | 80 | | 8807 |
| ENV | NVSTVQCTII | 287 | 9 | 51 | 80 | | 8808 |
| ENV | LLRAIEAQQH | 641 | 10 | 51 | 80 | | 8809 |
| ENV | GIWGCSGK | 680 | 8 | 52 | 81 | | 8810 |
| ENV | TTLFCASDA | 61 | 9 | 52 | 81 | | 8811 |
| ENV | TLFCASDAK | 64 | 9 | 52 | 81 | 0.0930 | 8812 |
| ENV | TLFCASDA | 64 | 8 | 54 | 84 | | 8813 |
| ENV | RSELYKYK | 558 | 8 | 54 | 84 | | 8814 |
| ENV | LLLNGSLA | 306 | 8 | 55 | 86 | | 8815 |
| ENV | QLLLNGSLA | 305 | 9 | 55 | 86 | | 8816 |
| ENV | GAAGSTMGA | 610 | 9 | 55 | 86 | | 8817 |
| ENV | LGAAGSTMGA | 609 | 10 | 55 | 86 | | 8818 |
| ENV | STQLLLNGSLA | 303 | 11 | 55 | 86 | | 8819 |
| ENV | FLGAAGSTMG | 608 | 11 | 55 | 86 | | 8820 |
| ENV | LFCASDAK | 65 | 8 | 57 | 89 | | 8821 |
| ENV | AAGSTMGA | 611 | 8 | 58 | 91 | | 8822 |
| GAG | EDTSARQA | 133 | 8 | 01 | 33 | | 8823 |
| GAG | AAAIMMQK | 405 | 8 | 01 | 25 | | 8824 |
| GAG | SATIMMQR | 405 | 8 | 01 | 25 | | 8825 |
| GAG | TAPPPESF | S08 | 8 | 01 | 33 | | 8826 |
| GAG | KDKDKELY | 535 | 8 | 01 | 25 | | 8827 |
| GAG | ETIDKDLY | 537 | 8 | 01 | 25 | | 8828 |
| GAG | NSATIMMQR | 404 | 9 | 01 | 33 | | 8829 |
| GAG | PTAPPPESF | 507 | 9 | 01 | 33 | | 8830 |
| GAG | TAPPPESFR | 508 | 9 | 01 | 33 | | 8831 |
| GAG | NGKQANFLGK | 461 | 10 | 01 | 25 | | 8832 |
| GAG | NGRQANFLGK | 461 | 10 | 01 | 25 | | 8833 |
| GAG | PTAPPPESFR | 507 | 10 | 01 | 33 | | 8834 |
| GAG | TAPPPESFRF | 508 | 10 | 01 | 33 | | 8835 |
| GAG | TIDKDLYPLA | 538 | 10 | 01 | 25 | | 8836 |
| GAG | AAAIMMQKSN | 405 | 11 | 01 | 25 | | 8837 |
| GAG | SATIMMQRGN | 405 | 11 | 01 | 25 | | 8838 |
| GAG | NGKQANFLGK | 461 | 11 | 01 | 25 | | 8839 |
| GAG | NGRQANFLGK | 461 | 11 | 01 | 25 | | 8840 |
| GAG | PTAPPPESFRF | 507 | 11 | 01 | 33 | | 8841 |
| GAG | KDKDKELYPL | 535 | 11 | 01 | 25 | | 8842 |
| GAG | ETIDKDLYPLA | 537 | 11 | 01 | 25 | | 8843 |
| GAG | PAAADKEK | 123 | 8 | 01 | 50 | | 8844 |
| GAG | ASAQQDLK | 392 | 8 | 01 | 50 | | 8845 |
| GAG | ATAQQDLK | 392 | 8 | 01 | 50 | | 8846 |
| GAG | PAEPTAPPA | 492 | 9 | 01 | 50 | | 8847 |
| GAG | AADKGVSQNY | 130 | 10 | 01 | 50 | | 8848 |
| GAG | SAQQDLKGGY | 393 | 10 | 01 | 50 | | 8849 |
| GAG | TAQQDLKGGY | 393 | 10 | 01 | 50 | | 8850 |
| GAG | GTRPGNYVQK | 480 | 10 | 01 | 50 | | 8851 |
| GAG | GTRPGNYVQR | 480 | 10 | 01 | 50 | | 8852 |
| GAG | ITSLPKQEQK | 526 | 10 | 01 | 50 | | 8853 |
| GAG | PAAADKEKDS | 123 | 11 | 01 | 50 | | 8854 |
| GAG | GANSIPVGDIY | 276 | 11 | 01 | 50 | | 8855 |
| GAG | ASAQQDLKGG | 392 | 11 | 01 | 50 | | 8856 |
| GAG | ATAQQDLKGG | 392 | 11 | 01 | 50 | | 8857 |
| GAG | EITSLPKQEQK | 525 | 11 | 01 | 50 | | 8858 |
| GAG | YTAVFMQR | 405 | 8 | 02 | 50 | | 8859 |
| GAG | TAPPAESF | 508 | 8 | 02 | 67 | | 8860 |
| GAG | PTAPPAESF | 507 | 9 | 02 | 67 | | 8861 |
| GAG | TAPPAESFR | 508 | 9 | 02 | 67 | | 8862 |
| GAG | PTAPPAESFR | 507 | 10 | 02 | 67 | | 8863 |
| GAG | TAPPAESFRF | 508 | 10 | 02 | 67 | | 8864 |
| GAG | PTAPPAESFRF | 507 | 11 | 02 | 67 | | 8865 |
| GAG | EGRQANFLGK | 462 | 10 | 02 | 100 | | 8866 |
| GAG | AADKGKVSQN | 129 | 11 | 02 | 18 | | 8867 |
| GAG | EADGKVSQNY | 129 | 10 | 04 | 36 | | 8868 |
| GAG | AAAIMMQK | 400 | 8 | 04 | 19 | | 8869 |
| GAG | AAIMMQKSNF | 406 | 10 | 06 | 15 | | 8870 |
| GAG | AAIMMQKSNF | 406 | 11 | 06 | 15 | | 8871 |
| GAG | KTVKCFNCGK | 421 | 10 | 08 | 16 | | 8872 |
| GAG | NIMMQRGNF | 407 | 9 | 10 | 17 | | 8873 |
| GAG | GARASILR | 2 | 8 | 10 | 16 | | 8874 |
| GAG | PGNFPQSR | 483 | 8 | 10 | 16 | | 8875 |
| GAG | MGARASILR | 1 | 9 | 10 | 16 | | 8876 |
| GAG | KIWPSSKGR | 472 | 9 | 10 | 16 | | 8877 |
| GAG | TGNSSQVSQN | 139 | 11 | 10 | 16 | | 8878 |
| GAG | NFLGKIWPSSK | 468 | 11 | 10 | 16 | | 8879 |
| GAG | NFLQNRPEPTA | 485 | 11 | 10 | 16 | | 8880 |
| GAG | PVAPGQMR | 243 | 8 | 10 | 16 | | 8881 |
| GAG | MMQKSNFK | 409 | 8 | 10 | 16 | | 8882 |
| GAG | MMQRGNFK | 409 | 8 | 10 | 16 | | 8883 |
| GAG | KLDKWEKIR | 12 | 9 | 10 | 16 | | 8884 |
| GAG | GGKKKYKLK | 24 | 9 | 10 | 16 | 0.0001 | 8885 |
| GAG | RDTKEALDK | 97 | 9 | 10 | 16 | | 8886 |
| GAG | ALSPRTLNA | 167 | 9 | 10 | 16 | | 8887 |
| GAG | IMMQKSNFK | 408 | 9 | 10 | 16 | | 8888 |
| GAG | LGKIWPSSK | 470 | 9 | 10 | 16 | | 8889 |
| GAG | PGGKKKYKLK | 23 | 10 | 10 | 16 | | 8890 |
| GAG | GGKKKYKLKII | 24 | 10 | 10 | 16 | | 8891 |
| GAG | QALSPRTLNA | 166 | 10 | 10 | 16 | | 8892 |
| GAG | AGPVAPGQMR | 241 | 10 | 10 | 16 | | 8893 |
| GAG | GASLEEMMTA | 364 | 10 | 10 | 16 | | 8894 |
| GAG | FLGKIWPSSK | 469 | 10 | 10 | 16 | | 8895 |
| GAG | FLQNRPEPTA | 486 | 10 | 10 | 16 | | 8896 |
| GAG | TAPPAESFGF | 496 | 10 | 10 | 16 | | 8897 |
| GAG | KLDKWEKIRL | 12 | 11 | 10 | 16 | | 8898 |
| GAG | PGGKKKYKLK | 23 | 11 | 10 | 16 | | 8899 |
| GAG | LGKIWPSSKGR | 470 | 11 | 10 | 16 | | 8900 |
| GAG | PTAPPAESFGF | 495 | 11 | 10 | 16 | | 8901 |
| GAG | ATIMMQRGNF | 406 | 10 | 11 | 28 | | 8902 |
| GAG | ATIMMQRGNF | 406 | 11 | 11 | 28 | | 8903 |
| GAG | PSQKQEPIDK | 528 | 10 | 11 | 18 | | 8904 |
| GAG | SSKGRPGNF | 476 | 9 | 11 | 18 | | 8905 |
| GAG | TTSTLQEQIA | 260 | 10 | 11 | 17 | | 8906 |
| GAG | DVKDTKEA | 95 | 8 | 11 | 17 | | 8907 |
| GAG | PIPVGDIY | 279 | 8 | 11 | 17 | | 8908 |
| GAG | SLEEMMTA | 366 | 8 | 11 | 17 | | 8909 |
| GAG | MSQVTNSA | 391 | 8 | 11 | 17 | | 8910 |
| GAG | IMMQKSNF | 408 | 8 | 11 | 17 | | 8911 |
| GAG | IDVKDTKEA | 94 | 9 | 11 | 17 | | 8912 |
| GAG | ASLEEMMTA | 365 | 9 | 11 | 17 | | 8913 |
| GAG | AMSQVTNSA | 390 | 9 | 11 | 17 | | 8914 |
| GAG | TIKCFNCGK | 422 | 9 | 11 | 17 | | 8915 |
| GAG | TVKCFNCGK | 422 | 9 | 11 | 17 | | 8916 |
| GAG | EAMSQVTNSA | 389 | 10 | 11 | 17 | | 8917 |
| GAG | PSSKGRPGNF | 475 | 10 | 11 | 17 | | 8918 |
| GAG | GTTSTLQEQIA | 259 | 11 | 11 | 17 | | 8919 |
| GAG | TIMMQRGNFR | 407 | 10 | 12 | 21 | | 8920 |
| GAG | QTGSEELR | 71 | 8 | 12 | 19 | | 8921 |
| GAG | KSKKKAQQAA | 112 | 10 | 12 | 19 | | 8922 |
| GAG | KSKKKAQQAA | 112 | 11 | 12 | 19 | | 8923 |
| GAG | PGGKKKYK | 23 | 8 | 12 | 19 | | 8924 |
| GAG | TLYCVHQK | 86 | 8 | 12 | 19 | | 8925 |
| GAG | DTKEALEK | 98 | 8 | 12 | 19 | | 8926 |
| GAG | MLNIVGGII | 208 | 8 | 12 | 19 | | 8927 |
| GAG | NIVGGIIQA | 210 | 8 | 12 | 19 | | 8928 |
| GAG | IVGGIIQAA | 211 | 8 | 12 | 19 | | 8929 |
| GAG | STLQEQIA | 262 | 8 | 12 | 19 | | 8930 |
| GAG | PTSILDIR | 303 | 8 | 12 | 19 | | 8931 |
| GAG | LTSLRSLF | 549 | 8 | 12 | 19 | | 8932 |
| GAG | GSEELRSLY | 73 | 9 | 12 | 19 | | 8933 |
| GAG | ATLYCYIIQK | 85 | 9 | 12 | 19 | | 8934 |
| GAG | KDTKEALEK | 97 | 9 | 12 | 19 | | 8935 |
| GAG | MMLNIVGGH | 207 | 9 | 12 | 19 | | 8936 |
| GAG | NIVGGIIQAA | 210 | 9 | 12 | 19 | | 8937 |
| GAG | TSTLQEQIA | 261 | 9 | 12 | 19 | | 8938 |
| GAG | PLTSLKSLF | 548 | 9 | 12 | 19 | | 8939 |
| GAG | PLTSLRSLF | 548 | 9 | 12 | 19 | | 8940 |
| GAG | TGSEELRSLY | 72 | 10 | 12 | 19 | | 8941 |
| GAG | VATLYCVHQK | 84 | 10 | 12 | 19 | | 8942 |
| GAG | NAQGQMVHQA | 158 | 10 | 12 | 19 | | 8943 |
| GAG | NMMLNIVGGII | 206 | 10 | 12 | 19 | | 8944 |
| GAG | MLNIVGGIIQA | 208 | 10 | 12 | 19 | | 8945 |
| GAG | YSPTSILDIR | 301 | 10 | 12 | 19 | | 8946 |
| GAG | RAEQASQEVK | 329 | 10 | 12 | 19 | | 8947 |
| GAG | RLRPGGKKKY | 20 | 11 | 12 | 19 | | 8948 |
| GAG | TVATLYCVHQ | 83 | 11 | 12 | 19 | | 8949 |
| GAG | MMLNIVGGIIQ | 207 | 11 | 12 | 19 | | 8950 |
| GAG | MLNIVGGIIQA | 208 | 11 | 12 | 19 | | 8951 |
| GAG | TSILDIRQGPK | 304 | 11 | 12 | 19 | | 8952 |
| GAG | TIMMQRGNF | 407 | 9 | 13 | 22 | | 8953 |
| GAG | PGNFLQNR | 483 | 8 | 13 | 21 | | 8954 |
| GAG | IARNCRAPR | 434 | 9 | 13 | 21 | | 8955 |
| GAG | KIWPSNKGR | 472 | 9 | 13 | 21 | | 8956 |
| GAG | NCGKEGHIAR | 427 | 10 | 13 | 21 | | 8957 |
| GAG | IARNCRAPRK | 434 | 10 | 13 | 21 | | 8958 |
| GAG | IARNCRAPRKK | 434 | 11 | 13 | 21 | | 8959 |
| GAG | NFLGKIWPSNK | 468 | 11 | 13 | 21 | | 8960 |
| GAG | KGRPGNFLQN | 478 | 11 | 13 | 21 | | 8961 |
| GAG | KLKIIIVWA | 31 | 8 | 13 | 20 | | 8962 |
| GAG | RIEVKDTK | 93 | 8 | 13 | 20 | | 8963 |
| GAG | HIARNCRA | 433 | 8 | 13 | 20 | | 8964 |
| GAG | LTSLKSLF | 549 | 8 | 13 | 20 | | 8965 |
| GAG | IVKCFNCGK | 422 | 9 | 13 | 20 | | 8966 |
| GAG | CGKEGIIIAR | 428 | 9 | 13 | 20 | | 8967 |
| GAG | EGHIARNCR | 431 | 9 | 13 | 20 | | 8968 |
| GAG | LGKIWPSNK | 470 | 9 | 13 | 20 | | 8969 |
| GAG | KLKIIIVWASR | 31 | 10 | 13 | 20 | | 8970 |
| GAG | RIEVKDTKEA | 93 | 10 | 13 | 20 | | 8971 |
| GAG | TILRALGPGA | 356 | 10 | 13 | 20 | | 8972 |
| GAG | EGHIARNCRA | 431 | 10 | 13 | 20 | | 8973 |
| GAG | HIARNCRAPR | 433 | 10 | 13 | 20 | | 8974 |
| GAG | FLGKIWPSNK | 469 | 10 | 13 | 20 | | 8975 |
| GAG | EVKDTKEALD | 95 | 11 | 13 | 20 | | 8976 |
| GAG | FSPEVIPMFTA | 185 | 11 | 13 | 20 | | 8977 |
| GAG | AAEWDRVHPV | 230 | 11 | 13 | 20 | | 8978 |
| GAG | KTILRALGPGA | 355 | 11 | 13 | 20 | | 8979 |
| GAG | HIARNCRAPRK | 433 | 11 | 13 | 20 | | 8980 |
| GAG | LGKIWPSNKG | 470 | 11 | 13 | 20 | | 8981 |
| GAG | NSSQVSQNY | 144 | 9 | 14 | 31 | | 8982 |
| GAG | KSKKKAQQA | 112 | 9 | 14 | 22 | | 8983 |
| GAG | NCGKEGIIIAK | 427 | 10 | 14 | 22 | | 8984 |
| GAG | IAKNCRAPRKK | 434 | 11 | 14 | 22 | | 8985 |
| GAG | EVIPMFTA | 188 | 8 | 14 | 22 | | 8986 |
| GAG | RGNFRNQRK | 412 | 9 | 14 | 22 | | 8987 |
| GAG | CGKEGIIIAK | 428 | 9 | 14 | 22 | | 8988 |
| GAG | EGIIIAKNCR | 431 | 9 | 14 | 22 | | 8989 |
| GAG | EGIIIAKNCRA | 431 | 10 | 14 | 22 | | 8990 |
| GAG | PSNKGRPGNF | 475 | 10 | 14 | 22 | | 8991 |
| GAG | TAPPEESFRF | 496 | 10 | 14 | 22 | | 8992 |
| GAG | TVATLYCVIIQ | 83 | 11 | I4 | 22 | | 8993 |
| GAG | IVQNAQGQMV | 155 | 11 | 14 | 22 | | 8994 |
| GAG | PTAPPEESFRF | 495 | 11 | 14 | 22 | | 8995 |
| GAG | SSQVSQNY | 145 | 8 | 15 | 31 | | 8996 |
| GAG | VSQNYPIVQNA | 149 | 11 | 15 | 26 | | 8997 |
| GAG | RSLYNTVATL | 78 | 11 | 15 | 24 | | 8998 |
| GAG | TLYCVIIQR | 86 | 8 | 15 | 23 | | 8999 |
| GAG | FTALSEGA | 193 | 8 | 15 | 23 | | 9000 |
| GAG | AAEWDRVII | 230 | 8 | 15 | 23 | | 9001 |
| GAG | WDRVIIPVII | 233 | 8 | 15 | 23 | | 9002 |
| GAG | RGNFRNQR | 412 | 8 | 15 | 23 | | 9003 |
| GAG | TAPPEESF | 496 | 8 | 15 | 23 | | 9004 |
| GAG | LASLKSLF | 549 | 8 | 15 | 23 | | 9005 |
| GAG | VLSGGKLDA | 7 | 9 | 15 | 23 | | 9006 |
| GAG | LFNTVATLY | 80 | 9 | 15 | 23 | | 9007 |
| GAG | ATLYCVIIQR | 85 | 9 | 15 | 23 | 0.0150 | 9008 |
| GAG | MFTALSEGA | 192 | 9 | 15 | 23 | | 9009 |
| GAG | EAAEWDRVII | 229 | 9 | 15 | 23 | | 9010 |
| GAG | WDRVIIPVIIA | 233 | 9 | 15 | 23 | | 9011 |
| GAG | PTAPPEESF | 495 | 9 | 15 | 23 | | 9012 |
| GAG | TAPPEESFR | 496 | 9 | 15 | 23 | | 9013 |
| GAG | PLASLKSLF | 548 | 9 | 15 | 23 | | 9014 |
| GAG | SVLSGGKLDA | 6 | 10 | 15 | 23 | | 9015 |
| GAG | SGGKLDAWEK | 9 | 10 | 15 | 23 | | 9016 |
| GAG | ELRSLYNTVA | 76 | 10 | 15 | 23 | | 9017 |
| GAG | SLFNTVATLY | 79 | 10 | 15 | 23 | | 9018 |
| GAG | VATLYCVHQR | 84 | 10 | 15 | 23 | | 9019 |
| GAG | KIEELQNKSK | 105 | 10 | 15 | 23 | | 9020 |
| GAG | PMFTALSEGA | 191 | 10 | 15 | 23 | | 9021 |
| GAG | RAEQATQDVK | 329 | 10 | 15 | 23 | | 9022 |
| GAG | PTAPPEESFR | 495 | 10 | 15 | 23 | | 9023 |
| GAG | ASVLSGGKLD | 5 | 11 | 15 | 23 | | 9024 |
| GAG | LSGGKLDAWE | 8 | 11 | 15 | 23 | | 9025 |
| GAG | PGLLETSEGCR | 50 | 11 | 15 | 23 | | 9026 |
| GAG | KIEEEQNKSKK | 105 | 11 | 15 | 23 | | 9027 |
| GAG | RLIIPVHAGPIA | 235 | 11 | 15 | 23 | | 9028 |
| GAG | MMQRGNFRN | 409 | 11 | 15 | 23 | | 9029 |
| GAG | IAKNCRAPRK | 434 | 10 | 16 | 25 | | 9030 |
| GAG | LSGGKLDA | 8 | 8 | 16 | 25 | | 9031 |
| GAG | LDAWEKIR | 13 | 8 | 16 | 25 | | 9032 |
| GAG | NAQGQMVII | 158 | 8 | 16 | 25 | | 9033 |
| GAG | PVSILDIK | 303 | 8 | 16 | 25 | | 9034 |
| GAG | ILKALGPA | 357 | 8 | 16 | 25 | | 9035 |
| GAG | KLDAWEKIR | 12 | 9 | 16 | 25 | | 9036 |
| GAG | GGKKKYRLK | 24 | 9 | 16 | 25 | | 9037 |
| GAG | TILKALGPA | 356 | 9 | 16 | 25 | | 9038 |
| GAG | ILKALGPAA | 357 | 9 | 16 | 25 | 0.0003 | 9039 |
| GAG | VLAEAMSQA | 386 | 9 | 16 | 25 | | 9040 |
| GAG | LDAWEKIRLR | 13 | 10 | 16 | 25 | | 9041 |
| GAG | PGGKKKYRLK | 23 | 10 | 16 | 25 | | 9042 |
| GAG | GGKKKYRLKII | 24 | 10 | 16 | 25 | | 9043 |
| GAG | GLLETSEGCR | 51 | 10 | 16 | 25 | | 9044 |
| GAG | YSPVSILDIK | 301 | 10 | 16 | 25 | | 9045 |
| GAG | KTILKALGPA | 355 | 10 | 16 | 25 | 0.0045 | 9046 |
| GAG | TILKALGPAA | 356 | 10 | 16 | 25 | | 9047 |
| GAG | AATLEEMMTA | 364 | 10 | 16 | 25 | | 9048 |
| GAG | RVLAEAMSQA | 385 | 10 | 16 | 25 | | 9049 |
| GAG | GGKLDAWEKI | 10 | 11 | 16 | 25 | | 9050 |
| GAG | KLDAWEKIRL | 12 | 11 | 16 | 25 | | 9051 |
| GAG | PGGKKKYRLK | 23 | 11 | 16 | 25 | | 9052 |
| GAG | VSILDIKQGPK | 304 | 11 | 16 | 25 | | 9053 |
| GAG | KTILKALGPAA | 355 | 11 | 16 | 25 | | 9054 |
| GAG | PAATLEEMMT | 363 | 11 | 16 | 25 | | 9055 |
| GAG | HIAKNCRAPRK | 433 | 11 | 16 | 25 | | 9056 |
| GAG | LAEAMSQA | 387 | 8 | 17 | 27 | | 9057 |
| GAG | RLKHLVWA | 31 | 8 | 17 | 27 | | 9058 |
| GAG | LSPRTLNA | 168 | 8 | 17 | 27 | | 9059 |
| GAG | PIPPGQMR | 243 | 8 | 17 | 27 | | 9060 |
| GAG | GGKLDAWEK | 10 | 9 | 17 | 27 | | 9061 |
| GAG | DAWEKIRLR | 14 | 9 | 17 | 27 | | 9062 |
| GAG | LLETSEGCR | 52 | 9 | 17 | 27 | | 9063 |
| GAG | RLKHLVWASR | 31 | 10 | 17 | 27 | | 9064 |
| GAG | LDKIEEEQNK | 103 | 10 | 17 | 27 | | 9065 |
| GAG | AGPIPPGQMR | 241 | 10 | 17 | 27 | | 9066 |
| GAG | ALDKIEEEQNK | 102 | 11 | 17 | 27 | | 9067 |
| GAG | LSPRTLNAWV | 168 | 11 | 17 | 27 | | 9068 |
| GAG | HAGPIPPGQMR | 240 | 11 | 17 | 27 | | 9069 |
| GAG | PIPPGQMREPR | 243 | 11 | 17 | 27 | | 9070 |
| GAG | PGATLEEMMT | 363 | 11 | 17 | 27 | | 9071 |
| GAG | RSLYNTVA | 78 | 8 | 18 | 29 | | 9072 |
| GAG | IAKNCRAPR | 434 | 9 | 18 | 29 | 0.0009 | 9073 |
| GAG | LDKWEKIR | 13 | 8 | 18 | 28 | | 9074 |
| GAG | PVGDIYKR | 281 | 8 | 18 | 28 | | 9075 |
| GAG | PDCKTILR | 352 | 8 | 18 | 28 | | 9076 |
| GAG | DCKTILRA | 353 | 8 | 18 | 28 | | 9077 |
| GAG | IIIAKNCRA | 433 | 8 | 18 | 28 | | 9078 |
| GAG | PDCKTILRA | 352 | 9 | 18 | 28 | | 9079 |
| GAG | ILRALGPGA | 357 | 9 | 18 | 28 | | 9080 |
| GAG | LDKWEKIRLR | 13 | 10 | 18 | 28 | | 9081 |
| GAG | SILDIKQGPK | 305 | 10 | 18 | 28 | | 9082 |
| GAG | IIIAKNCRAPR | 433 | 10 | 18 | 28 | | 9083 |
| GAG | IIAGPIAPGQM | 240 | 11 | 18 | 28 | | 9084 |
| GAG | NANPDCKTILR | 349 | 11 | 18 | 28 | | 9085 |
| GAG | LARNCRAPRK | 434 | 11 | 19 | 30 | | 9086 |
| GAG | PVIIAGPIA | 238 | 8 | 19 | 30 | | 9087 |
| GAG | PIAPGQMR | 243 | 8 | 19 | 30 | | 9088 |
| GAG | LDIKQGPK | 307 | 8 | 19 | 30 | | 9089 |
| GAG | ILDIKQGPK | 306 | 9 | 19 | 30 | | 9090 |
| GAG | PSIIKARVLA | 380 | 9 | 19 | 30 | | 9091 |
| GAG | AGPIAPGQMR | 241 | 10 | 19 | 30 | | 9092 |
| GAG | IAPGQMREPR | 244 | 10 | 19 | 30 | | 9093 |
| GAG | DIKQGPKEPF | 308 | 10 | 19 | 30 | | 9094 |
| GAG | RLRPGGKKKY | 20 | 11 | 19 | 30 | | 9095 |
| GAG | IVWASRELERF | 35 | 11 | 19 | 30 | | 9096 |
| GAG | PIAPGQMREPR | 243 | 11 | 19 | 30 | | 9097 |
| GAG | LDIKQGPKEPF | 307 | 11 | 19 | 30 | | 9098 |
| GAG | DIKQGPKEPFR | 308 | 11 | 19 | 30 | | 9099 |
| GAG | GGPSIIKARVL | 378 | 11 | 19 | 30 | | 9100 |
| GAG | PSIIKARVLAE | 380 | 11 | 19 | 30 | | 9101 |
| GAG | LARNCRAPR | 434 | 9 | 20 | 32 | | 9102 |
| GAG | LARNCRAPRK | 434 | 10 | 20 | 32 | | 9103 |
| GAG | PGGKKKYR | 23 | 8 | 20 | 31 | | 9104 |
| GAG | TAPPAESF | 496 | 8 | 20 | 31 | | 9105 |
| GAG | IMMQRGNFR | 408 | 9 | 20 | 31 | | 9106 |
| GAG | PTAPPAESF | 495 | 9 | 20 | 31 | | 9107 |
| GAG | IVWASRELER | 35 | 10 | 20 | 31 | 0.0099 | 9108 |
| GAG | HLARNCRAPR | 433 | 10 | 20 | 31 | | 9109 |
| GAG | HIVWASRELER | 34 | 11 | 20 | 31 | | 9110 |
| GAG | IILARNCRAPR | 433 | 11 | 20 | 31 | | 9111 |
| GAG | IILARNCRA | 433 | 8 | 21 | 33 | | 9112 |
| GAG | EGIILARNCR | 431 | 9 | 21 | 33 | | 9113 |
| GAG | NLQGQMVHQA | 158 | 10 | 21 | 33 | | 9114 |
| GAG | EGHLARNCRA | 431 | 10 | 21 | 33 | | 9115 |
| GAG | QSRPEPTAPPA | 488 | 11 | 21 | 33 | | 9116 |
| GAG | KIWPSIIKGR | 472 | 9 | 22 | 35 | 0.0770 | 9117 |
| GAG | EVKDTKEA | 95 | 8 | 22 | 34 | | 9118 |
| GAG | ETINEEAA | 224 | 8 | 22 | 34 | | 9119 |
| GAG | DTLLVQNA | 343 | 8 | 22 | 34 | | 9120 |
| GAG | GGPSIIKAR | 378 | 8 | 22 | 34 | | 9121 |
| GAG | TDTLLVQNA | 342 | 9 | 22 | 34 | | 9122 |
| GAG | VGGPSHKAR | 377 | 9 | 22 | 34 | | 9123 |
| GAG | SLYNTYATLY | 79 | 10 | 22 | 34 | | 9124 |
| GAG | MLKETINEEA | 221 | 10 | 22 | 34 | | 9125 |
| GAG | MTDTLLVQNA | 341 | 10 | 22 | 34 | | 9126 |
| GAG | GVGGPSHKAR | 376 | 10 | 22 | 34 | | 9127 |
| GAG | QMLKETINEEA | 220 | 11 | 22 | 34 | | 9128 |
| GAG | MLKETINEEAA | 221 | 11 | 22 | 34 | | 9129 |
| GAG | WMTDTLLVQ | 340 | 11 | 22 | 34 | | 9130 |
| GAG | QGVGGPSHKA | 375 | 11 | 22 | 34 | | 9131 |
| GAG | LGKIWPSIIKG | 470 | 11 | 22 | 34 | | 9132 |
| GAG | NFLGKIWPSHK | 468 | 11 | 23 | 37 | | 9133 |
| GAG | KIEEEQNK | 105 | 8 | 23 | 36 | | 9134 |
| GAG | QGVGGPSII | 375 | 8 | 23 | 36 | | 9135 |
| GAG | GVGGPSIIK | 376 | 8 | 23 | 36 | | 9136 |
| GAG | VGGPSIIKA | 377 | 8 | 23 | 36 | | 9137 |
| GAG | MMQRGNFR | 409 | 8 | 23 | 36 | | 9138 |
| GAG | QGVGGPSIIK | 375 | 9 | 23 | 36 | | 9139 |
| GAG | GVGGPSIIKA | 376 | 9 | 23 | 36 | | 9140 |
| GAG | LGKIWPSIIK | 470 | 9 | 23 | 36 | | 9141 |
| GAG | ACQGVGGPSII | 373 | 10 | 23 | 36 | | 9142 |
| GAG | QGVGGPSIIKA | 375 | 10 | 23 | 36 | | 9143 |
| GAG | FLGKIWPSIIK | 469 | 10 | 23 | 36 | 0.0200 | 9144 |
| GAG | PSIIKGRPGNF | 475 | 10 | 23 | 36 | | 9145 |
| GAG | TACQGVGGPS | 372 | 11 | 23 | 36 | | 9146 |
| GAG | ACQGVGGPSII | 373 | 11 | 23 | 36 | | 9147 |
| GAG | NCGKEGIILAR | 427 | 10 | 24 | 38 | | 9148 |
| GAG | KVIEEKAF | 178 | 8 | 24 | 38 | | 9149 |
| GAG | CGKEGIILAR | 428 | 9 | 24 | 38 | | 9150 |
| GAG | WVKVIEEKAF | 176 | 10 | 24 | 38 | | 9151 |
| GAG | YSPVSILDIR | 301 | 10 | 24 | 38 | | 9152 |
| GAG | NFLGKIWPSII | 468 | 10 | 25 | 40 | | 9153 |
| GAG | PVSILDIR | 303 | 8 | 25 | 39 | | 9154 |
| GAG | LGKIWIPSII | 470 | 8 | 25 | 39 | | 9155 |
| GAG | KDTKEALDK | 97 | 9 | 25 | 39 | | 9156 |
| GAG | WVKVIEEKA | 176 | 9 | 25 | 39 | | 9157 |
| GAG | FLGKIWPSII | 469 | 9 | 25 | 39 | | 9158 |
| GAG | LYWASRELER | 35 | 11 | 25 | 39 | | 9159 |
| GAG | NAWVKVIEEK | 174 | 11 | 25 | 39 | | 9160 |
| GAG | VSILDIRQGPK | 304 | 11 | 25 | 39 | | 9161 |
| GAG | LVWASRELER | 35 | 10 | 26 | 41 | | 9162 |
| GAG | HLVWASRELE | 34 | 11 | 26 | 41 | | 9163 |
| GAG | CFNCGKEGIIIA | 425 | 11 | 26 | 41 | | 9164 |
| GAG | NCGKEGIIIA | 427 | 9 | 27 | 43 | | 9165 |
| GAG | NCGKEGIILA | 427 | 9 | 27 | 43 | | 9166 |
| GAG | RFFKTLRA | 323 | 8 | 27 | 42 | | 9167 |
| GAG | IMMQRGNF | 408 | 8 | 27 | 42 | | 9168 |
| GAG | CGKEGHIA | 428 | 8 | 27 | 42 | | 9169 |
| GAG | CGKEGIILA | 428 | 8 | 27 | 42 | | 9170 |
| GAG | MVIIQAISPR | 163 | 9 | 27 | 42 | 0.1800 | 9171 |
| GAG | VDRFFKTLR | 321 | 9 | 27 | 42 | | 9172 |
| GAG | QMVIIQAISPR | 162 | 10 | 27 | 42 | 0.0260 | 9173 |
| GAG | YVDRFFKTLR | 320 | 10 | 27 | 42 | | 9174 |
| GAG | VDRFFKTLRA | 321 | 10 | 27 | 42 | | 9175 |
| GAG | FFKTLRAEQA | 324 | 10 | 27 | 42 | | 9176 |
| GAG | RAEQATQEVK | 329 | 10 | 27 | 42 | | 9177 |
| GAG | NAWVKVVEEK | 174 | 11 | 27 | 42 | | 9178 |
| GAG | YVDRFFKTLR | 320 | 11 | 27 | 42 | | 9179 |
| GAG | RFFKTLRAEQ | 323 | 11 | 27 | 42 | | 9180 |
| GAG | RFYKTLRAEQ | 323 | 11 | 27 | 42 | | 9181 |
| GAG | NANPDCKTILK | 349 | 11 | 27 | 42 | | 9182 |
| GAG | CFNCGKEGHL | 425 | 11 | 27 | 42 | | 9183 |
| GAG | KGRPGNFLQS | 478 | 11 | 28 | 44 | | 9184 |
| GAG | NFLQSRPEPTA | 485 | 11 | 28 | 44 | | 9185 |
| GAG | KVVEEKAF | 178 | 8 | 28 | 44 | | 9186 |
| GAG | RFYKTLRA | 323 | 8 | 28 | 44 | | 9187 |
| GAG | PDCKTILK | 352 | 8 | 28 | 44 | | 9188 |
| GAG | DCKTILKA | 353 | 8 | 28 | 44 | | 9189 |
| GAG | WVKVVEEKA | 176 | 9 | 28 | 44 | | 9190 |
| GAG | VDRFYKTLR | 321 | 9 | 28 | 44 | | 9191 |
| GAG | PDCKTILKA | 352 | 9 | 28 | 44 | | 9192 |
| GAG | WVKVVEEKAF | 176 | 10 | 28 | 44 | | 9193 |
| GAG | PFRDYVDRFY | 316 | 10 | 28 | 44 | | 9194 |
| GAG | YVDRFYKTLR | 320 | 10 | 28 | 44 | 0.0003 | 9195 |
| GAG | VDRFYKTLRA | 321 | 10 | 28 | 44 | | 9196 |
| GAG | GATLEEMMTA | 364 | 10 | 28 | 44 | | 9197 |
| GAG | FLQSRPEPTA | 486 | 10 | 28 | 44 | 0.0005 | 9198 |
| GAG | PFRDYVDRFY | 316 | 11 | 28 | 44 | | 9199 |
| GAG | YVDRFYKTLR | 320 | 11 | 28 | 44 | | 9200 |
| GAG | GARASVLSGG | 2 | 11 | 29 | 46 | | 9201 |
| GAG | ASVLSGGK | 5 | 8 | 29 | 45 | | 9202 |
| GAG | NLQGQMVII | 158 | 8 | 29 | 45 | | 9203 |
| GAG | WVKVIEEK | 176 | 8 | 29 | 45 | | 9204 |
| GAG | WDRLHPVH | 233 | 8 | 29 | 45 | | 9205 |
| GAG | RDYVDRFY | 318 | 8 | 29 | 45 | | 9206 |
| GAG | RASVLSGGK | 4 | 9 | 29 | 45 | | 9207 |
| GAG | AISPRTLNA | 167 | 9 | 29 | 45 | 0.0050 | 9208 |
| GAG | WDRLHPVHA | 233 | 9 | 29 | 45 | | 9209 |
| GAG | RDYVDRFYK | 318 | 9 | 29 | 45 | 0.0007 | 9210 |
| GAG | QAISPRTLNA | 166 | 10 | 29 | 45 | | 9211 |
| GAG | NAWVKVIEEK | 174 | 10 | 29 | 45 | | 9212 |
| GAG | IVQNLQGQMV | 155 | 11 | 29 | 45 | | 9213 |
| GAG | AAEWDRLHPV | 230 | 11 | 29 | 45 | | 9214 |
| GAG | PGNFLQSR | 483 | 8 | 30 | 48 | | 9215 |
| GAG | NAWVKVVEEK | 174 | 10 | 30 | 47 | 0.0004 | 9216 |
| GAG | KIRLRPGGKKK | 18 | 11 | 30 | 47 | | 9217 |
| GAG | WVKVVEEK | 176 | 8 | 31 | 48 | 0.0003 | 9218 |
| GAG | MLKDTINEEA | 221 | 10 | 32 | 50 | | 9219 |
| GAG | QMLKDTINEEA | 220 | 11 | 32 | 50 | | 9220 |
| GAG | MLKDTINEEAA | 221 | 11 | 32 | 50 | | 9221 |
| GAG | KDTINEEA | 223 | 8 | 33 | 52 | | 9222 |
| GAG | DTINEEAA | 224 | 8 | 33 | 52 | | 9223 |
| GAG | KDTINEEAA | 223 | 9 | 33 | 52 | | 9224 |
| GAG | RDYVDRFFK | 318 | 9 | 33 | 52 | | 9225 |
| GAG | PFRDYVDRFF | 316 | 11 | 33 | 52 | | 9226 |
| GAG | RLRPGGKKK | 20 | 9 | 34 | 53 | | 9227 |
| GAG | RLRPGGKKKY | 20 | 10 | 34 | 53 | | 9228 |
| GAG | PIPVGEIYKR | 279 | 10 | 34 | 53 | 0.0003 | 9229 |
| GAG | PIPVGEIY | 279 | 8 | 35 | 55 | | 9230 |
| GAG | RDYVDRFF | 318 | 8 | 35 | 55 | | 9231 |
| GAG | PIPVGEIYK | 279 | 9 | 35 | 55 | 0.0002 | 9232 |
| GAG | PGIIKARVLA | 380 | 9 | 35 | 55 | | 9233 |
| GAG | PFRDYVDRFF | 316 | 10 | 35 | 55 | | 9234 |
| GAG | WMTETLLVQN | 340 | 11 | 35 | 55 | | 9235 |
| GAG | GGPGIIKARVL | 378 | 11 | 35 | 55 | | 9236 |
| GAG | PGIIKARVLAE | 380 | 11 | 35 | 55 | | 9237 |
| GAG | DTKEALDK | 98 | 8 | 36 | 56 | 0.0003 | 9238 |
| GAG | ISPRTLNA | 168 | 8 | 36 | 56 | | 9239 |
| GAG | QGVGGPGII | 375 | 8 | 36 | 56 | | 9240 |
| GAG | QSRPEPTA | 488 | 8 | 36 | 56 | | 9241 |
| GAG | QGVGGPGIIK | 375 | 9 | 36 | 56 | 0.0004 | 9242 |
| GAG | MTETLLVQNA | 341 | 10 | 36 | 56 | | 9243 |
| GAG | ACQGVGGPGII | 373 | 10 | 36 | 56 | | 9244 |
| GAG | QGVGGPGIIKA | 375 | 10 | 36 | 56 | | 9245 |
| GAG | ISPRTLNAWV | 168 | 11 | 36 | 56 | | 9246 |
| GAG | TACQGVGGPG | 372 | 11 | 36 | 56 | 0.0001 | 9247 |
| GAG | ACQGVGGPGII | 373 | 11 | 36 | 56 | | 9248 |
| GAG | QGVGCPGIIKA | 375 | 11 | 36 | 56 | | 9249 |
| GAG | QGQMVIIQA | 160 | 8 | 37 | 58 | | 9250 |
| GAG | ETLLVQNA | 343 | 8 | 37 | 58 | | 9251 |
| GAG | GVGGPGIIK | 376 | 8 | 37 | 58 | 0.0012 | 9252 |
| GAG | VGGPGIIKA | 377 | 8 | 37 | 58 | | 9253 |
| GAG | GGPGIIKAR | 378 | 8 | 37 | 58 | | 9254 |
| GAG | GVGGPGIIKA | 376 | 9 | 37 | 58 | | 9255 |
| GAG | VGGPGIIKAR | 377 | 9 | 37 | 58 | | 9256 |
| GAG | GVGGPGIIKAR | 376 | 10 | 37 | 58 | 0.0003 | 9257 |
| GAG | AAEWDRLII | 230 | 8 | 39 | 61 | | 9258 |
| GAG | EAAEWDRLII | 229 | 9 | 39 | 61 | | 9259 |
| GAG | PVGEIYKR | 281 | 8 | 40 | 63 | 0.0003 | 9260 |
| GAG | TVATLYCVH | 83 | 9 | 40 | 63 | | 9261 |
| GAG | NTVATLYCVH | 82 | 10 | 40 | 63 | | 9262 |
| GAG | SILDIRQGPK | 305 | 10 | 40 | 63 | 0.3100 | 9263 |
| GAG | FSPEVIPMFSA | 185 | 11 | 40 | 63 | | 9264 |
| GAG | DIRQGPKEPF | 308 | 10 | 41 | 64 | | 9265 |
| GAG | LDIRQGPKEPF | 307 | 11 | 41 | 64 | | 9266 |
| GAG | DIRQGPKEPFR | 308 | 11 | 41 | 64 | | 9267 |
| GAG | VATLYCVH | 84 | 8 | 42 | 66 | | 9268 |
| GAG | LDIRQGPK | 307 | 8 | 42 | 66 | | 9269 |
| GAG | ILDIRQGPK | 306 | 9 | 42 | 66 | 0.0420 | 9270 |
| GAG | NTMLNTVGGH | 206 | 10 | 42 | 66 | | 9271 |
| GAG | TMLNTVGGII | 207 | 9 | 43 | 67 | | 9272 |
| GAG | TMLNTVGGHQ | 207 | 11 | 43 | 67 | | 9273 |
| GAG | KGCWKCGK | 444 | 8 | 44 | 69 | | 9274 |
| GAG | KIRLRPGGK | 18 | 9 | 44 | 69 | | 9275 |
| GAG | ASRELERFA | 38 | 9 | 44 | 69 | | 9276 |
| GAG | KIRLRPGGKK | 18 | 10 | 44 | 69 | 1.9000 | 9277 |
| GAG | WASRELERFA | 37 | 10 | 44 | 69 | | 9278 |
| GAG | QMREPRGSDIA | 248 | 11 | 44 | 69 | | 9279 |
| GAG | KGCWKCGKEG | 444 | 11 | 44 | 69 | | 9280 |
| GAG | FSALSEGA | 193 | 8 | 45 | 70 | | 9281 |
| GAG | PGQMREPR | 246 | 8 | 45 | 70 | | 9282 |
| GAG | MFSALSEGA | 192 | 9 | 45 | 70 | | 9283 |
| GAG | CGKEGIIQMK | 449 | 9 | 45 | 70 | | 9284 |
| GAG | PMFSALSEGA | 191 | 10 | 45 | 70 | | 9285 |
| GAG | KCGKEGHQMK | 448 | 10 | 45 | 70 | | 9286 |
| GAG | ASRELERF | 38 | 8 | 46 | 72 | | 9287 |
| GAG | EVIPMFSA | 188 | 8 | 46 | 72 | | 9288 |
| GAG | TLEEMMTA | 366 | 8 | 46 | 72 | | 9289 |
| GAG | WASRELERF | 37 | 9 | 46 | 72 | | 9290 |
| GAG | ATLEEMMTA | 365 | 9 | 46 | 72 | 0.0003 | 9291 |
| GAG | MLNTVGGII | 208 | 8 | 47 | 73 | | 9292 |
| GAG | NTVGGIIQA | 210 | 8 | 47 | 73 | | 9293 |
| GAG | TVGGIIQAA | 211 | 8 | 47 | 73 | | 9294 |
| GAG | NTVGGIIQAA | 210 | 9 | 47 | 73 | | 9295 |
| GAG | MLNTVGGIIQA | 208 | 10 | 47 | 73 | 0.0005 | 9296 |
| GAG | MLNTVGGIIQA | 208 | 11 | 47 | 73 | | 9297 |
| GAG | WASRELER | 37 | 8 | 48 | 75 | | 9298 |
| GAG | GCWKCGKEGII | 445 | 10 | 48 | 75 | | 9299 |
| GAG | RLRPGGKK | 20 | 8 | 49 | 77 | | 9300 |
| GAG | QMKDCTER | 455 | 8 | 49 | 77 | | 9301 |
| GAG | QMKDCTERQA | 455 | 10 | 49 | 77 | | 9302 |
| GAG | EGIIQMKDCTE | 452 | 11 | 49 | 77 | | 9303 |
| GAG | AFSPEVIPMF | 184 | 10 | 50 | 78 | 0.0007 | 9304 |
| GAG | KAFSPEVIPMF | 183 | 11 | 50 | 78 | | 9305 |
| GAG | RAPRKKGCWK | 439 | 10 | 51 | 80 | | 9306 |
| GAG | KDCTERQA | 457 | 8 | 52 | 83 | | 9307 |
| GAG | KDCTERQANF | 457 | 10 | 52 | 83 | | 9308 |
| GAG | CTERQANFLG | 459 | 11 | 52 | 83 | | 9309 |
| GAG | DCTERQANF | 458 | 9 | 52 | 81 | | 9310 |
| GAG | NCRAPRKK | 437 | 8 | 53 | 84 | | 9311 |
| GAG | TINEEAAEWD | 225 | 11 | 53 | 83 | | 9312 |
| GAG | KTLRAEQA | 326 | 8 | 54 | 84 | | 9313 |
| GAG | FSPEVIPMF | 185 | 9 | 54 | 84 | | 9314 |
| GAG | CTERQANF | 459 | 8 | 55 | 87 | | 9315 |
| GAG | WIILGLNK | 289 | 8 | 57 | 89 | | 9316 |
| GAG | KARVLAEA | 383 | 8 | 57 | 89 | | 9317 |
| GAG | CFNCGKEGH | 425 | 9 | 57 | 89 | | 9318 |
| GAG | IILGLNKIVR | 290 | 10 | 57 | 89 | 0.0003 | 9319 |
| GAG | KCFNCGKEGII | 424 | 10 | 57 | 89 | | 9320 |
| GAG | WIILGLNKIVR | 289 | 11 | 57 | 89 | | 9321 |
| GAG | ILGLNKIVRMY | 291 | 11 | 57 | 89 | | 9322 |
| GAG | ILGLNKIVR | 291 | 9 | 58 | 91 | 0.0008 | 9323 |
| GAG | LGLNKIVRMY | 292 | 10 | 58 | 91 | 0.0004 | 9324 |
| GAG | LLVQNANPDC | 345 | 11 | 58 | 91 | | 9325 |
| GAG | LGLNKIVR | 292 | 8 | 59 | 92 | | 9326 |
| GAG | LVQNANPDCK | 346 | 10 | 59 | 92 | 0.0002 | 9327 |
| GAG | GLNKIVRMY | 293 | 9 | 60 | 94 | 0.0100 | 9328 |
| GAG | QAAMQMLK | 216 | 8 | 61 | 95 | | 9329 |
| GAG | GGIIQAAMQM | 213 | 11 | 61 | 95 | | 9330 |
| GAG | RTLNAWVK | 171 | 8 | 63 | 98 | 0.0410 | 9331 |
| GAG | QGPKEPFR | 311 | 8 | 63 | 98 | | 9332 |
| GAG | PFRDYVDR | 316 | 8 | 63 | 98 | | 9333 |
| GAG | PFRDYVDRF | 316 | 9 | 63 | 98 | | 9334 |
| GAG | QGPKEPFRDY | 311 | 10 | 63 | 98 | 0.0004 | 9335 |
| NEF | QAEPAAAGVG | 34 | 11 | 01 | 33 | | 9336 |
| NEF | RAQAEPAA | 32 | 8 | 01 | 17 | | 9337 |
| NEF | RAQAEPAAA | 32 | 9 | 01 | 17 | | 9338 |
| NEF | QTEPAAVGVG | 32 | 11 | 01 | 17 | | 9339 |
| NEF | RAEPAADGVG | 32 | 11 | 01 | 17 | | 9340 |
| NEF | RTEPAAVGVG | 32 | 11 | 01 | 17 | | 9341 |
| NEF | QAEPAAEGVG | 33 | 11 | 01 | 17 | | 9342 |
| NEF | QAPTAAKGVG | 33 | 11 | 01 | 17 | | 9343 |
| NEF | AADGVGAVSR | 42 | 10 | 09 | 15 | | 9344 |
| NEF | SSIVGWPA | 8 | 8 | 09 | 15 | | 9345 |
| NEF | VGWPAIRER | 11 | 9 | 10 | 17 | | 9346 |
| NEF | AAEGVGAA | 42 | 8 | 10 | 16 | | 9347 |
| NEF | FDSRLAFII | 310 | 8 | 10 | 16 | | 9348 |
| NEF | FDSRLAFIIII | 310 | 9 | 10 | 16 | | 9349 |
| NEF | DSRLAFIIII | 311 | 8 | 10 | 16 | | 9350 |
| NEF | AVSQDLDK | 48 | 8 | 10 | 16 | | 9351 |
| NEF | PLRPMTFK | 102 | 8 | 10 | 16 | | 9352 |
| NEF | KGAFDLSF | 109 | 8 | 10 | 16 | | 9353 |
| NEF | GAFDLSFF | 110 | 8 | 10 | 16 | | 9354 |
| NEF | GAVSQDLDK | 47 | 9 | 10 | 16 | | 9355 |
| NEF | QVPLRPMTF | 100 | 9 | 10 | 16 | | 9356 |
| NEF | KGAFDLSFF | 109 | 9 | 10 | 16 | | 9357 |
| NEF | GLEGLIYSK | 125 | 9 | 10 | 16 | | 9358 |
| NEF | MARELHPEY | 321 | 9 | 10 | 16 | | 9359 |
| NEF | VGAVSQDLDK | 46 | 10 | 10 | 16 | | 9360 |
| NEF | QVPLRPMTFK | 100 | 10 | 10 | 16 | | 9361 |
| NEF | GAFDLSFFLK | 110 | 10 | 10 | 16 | | 9362 |
| NEF | GGLEGLIYSK | 124 | 10 | 10 | 16 | | 9363 |
| NEF | CFKLVPVDPR | 226 | 10 | 10 | 16 | | 9364 |
| NEF | HMARELHPEY | 320 | 10 | 10 | 16 | | 9365 |
| NEF | MARELHPEVY | 321 | 10 | 10 | 16 | | 9366 |
| NEF | GVGAVSQDLD | 45 | 11 | 10 | 16 | | 9367 |
| NEF | KGAFDLSFFLK | 109 | 11 | 10 | 16 | | 9368 |
| NEF | KGGLEGLIYSK | 122 | 11 | 10 | 16 | | 9369 |
| NEF | WCFKLVPVDP | 225 | 11 | 10 | 16 | | 9370 |
| NEF | HMARELHPEY | 320 | 11 | 10 | 16 | | 9371 |
| NEF | MARELHPEYY | 321 | 11 | 10 | 16 | | 9372 |
| NEF | AVSRDLEK | 48 | 8 | 11 | 17 | | 9373 |
| NEF | VSRDLEKH | 49 | 8 | 11 | 17 | | 9374 |
| NEF | KLVPVDPR | 228 | 8 | 11 | 17 | | 9375 |
| NEF | GAVSRDLEK | 47 | 9 | 11 | 17 | 0.0002 | 9376 |
| NEF | AVSRDLEKH | 48 | 9 | 11 | 17 | | 9377 |
| NEF | VGAVSRDLEK | 46 | 10 | 11 | 17 | | 9378 |
| NEF | GAVSRDLEKH | 47 | 10 | 11 | 17 | | 9379 |
| NEF | VSRDLEKHGA | 49 | 10 | 11 | 17 | | 9380 |
| NEF | NSLLHPICQH | 255 | 10 | 11 | 17 | | 9381 |
| NEF | GVGAVSRDLE | 45 | 11 | 11 | 17 | | 9382 |
| NEF | VGAVSRDLEK | 46 | 11 | 11 | 17 | | 9383 |
| NEF | AVSRDLEKIIG | 48 | 11 | 11 | 17 | | 9384 |
| NEF | AATNADCA | 70 | 8 | 12 | 22 | | 9385 |
| NEF | ATNADCAWLE | 71 | 11 | 12 | 22 | | 9386 |
| NEF | EGENNCLLII | 251 | 9 | 12 | 19 | | 9387 |
| NEF | PMTYKGAF | 105 | 8 | 12 | 19 | | 9388 |
| NEF | YTPGPGVR | 207 | 8 | 12 | 19 | | 9389 |
| NEF | TAATNADCA | 69 | 9 | 12 | 19 | | 9390 |
| NEF | DILDLWVYII | 185 | 9 | 12 | 19 | | 9391 |
| NEF | NTAATNADCA | 68 | 10 | 12 | 19 | | 9392 |
| NEF | QDILDLWVYII | 184 | 10 | 12 | 19 | | 9393 |
| NEF | ITSSNTAATNA | 64 | 11 | 12 | 19 | | 9394 |
| NEF | PLRPMTYKGA | 102 | 11 | 12 | 19 | | 9395 |
| NEF | PGIRYPLTF | 211 | 9 | 13 | 21 | | 9396 |
| NEF | PGTRFPLTF | 211 | 9 | 13 | 21 | | 9397 |
| NEF | EGENNSLLII | 251 | 9 | 13 | 21 | | 9398 |
| NEF | WVYIITQGF | 191 | 8 | 13 | 20 | | 9399 |
| NEF | GIRYPLTF | 213 | 8 | 13 | 20 | | 9400 |
| NEF | GTRFPLTF | 213 | 8 | 13 | 20 | | 9401 |
| NEF | SSNTAATNA | 66 | 9 | 13 | 20 | | 9402 |
| NEF | WVYIITQGFF | 191 | 9 | 13 | 20 | | 9403 |
| NEF | YTPGPGTRF | 207 | 9 | 13 | 20 | | 9404 |
| NEF | TSSNTAATNA | 65 | 10 | 13 | 20 | | 9405 |
| NEF | VDLSIIFLKEK | 112 | 10 | 13 | 20 | | 9406 |
| NEF | DLWVYIITQGF | 188 | 10 | 13 | 20 | | 9407 |
| NEF | AVDLSIIFLKEK | 111 | 11 | 13 | 20 | | 9408 |
| NEF | LDLWVYIITQG | 187 | 11 | 13 | 20 | | 9409 |
| NEF | DLWVYIITQGF | 188 | 11 | 13 | 20 | | 9410 |
| NEF | PGPGIRYPLTF | 209 | 11 | 13 | 20 | | 9411 |
| NEF | PGPGTRFPLTF | 209 | 11 | 13 | 20 | | 9412 |
| NEF | VDLSIIFLK | 112 | 8 | 14 | 22 | | 9413 |
| NEF | DGLIYSKK | 172 | 8 | 14 | 22 | | 9414 |
| NEF | ELIIPEFYK | 324 | 8 | 14 | 22 | | 9415 |
| NEF | AITSSNTAA | 63 | 9 | 14 | 22 | 0.0003 | 9416 |
| NEF | AVDLSIIFLK | 111 | 9 | 14 | 22 | 0.0740 | 9417 |
| NEF | LDGLIYSKK | 171 | 9 | 14 | 22 | | 9418 |
| NEF | DGLIYSKKR | 172 | 9 | 14 | 22 | | 9419 |
| NEF | SLLIIPICQH | 256 | 9 | 14 | 22 | | 9420 |
| NEF | GAITSSNTAA | 62 | 10 | 14 | 22 | | 9421 |
| NEF | GLDGLIYSKK | 125 | 10 | 14 | 22 | | 9422 |
| NEF | LDGLIYSKKR | 171 | 10 | 14 | 22 | | 9423 |
| NEF | HGAITSSNTAA | 61 | 11 | 14 | 22 | | 9424 |
| NEF | GGLDGLIYSKK | 124 | 11 | 14 | 22 | | 9425 |
| NEF | GLDGLIYSKKR | 125 | 11 | 14 | 22 | | 9426 |
| NEF | PAADGVGA | 41 | 11 | 15 | 23 | | 9427 |
| NEF | ITSSNTAA | 64 | 8 | 15 | 23 | | 9428 |
| NEF | CLLHPMSQII | 256 | 9 | 15 | 23 | | 9429 |
| NEF | NCLLIIPMSQH | 255 | 10 | 15 | 23 | | 9430 |
| NEF | EAQEEEEVGF | 82 | 10 | 16 | 25 | | 9431 |
| NEF | RDLEKIIGA | 51 | 8 | 16 | 25 | | 9432 |
| NEF | LDGLIYSK | 171 | 8 | 16 | 25 | | 9433 |
| NEF | GLDGLIYSK | 125 | 9 | 16 | 25 | | 9434 |
| NEF | GGLDGLIYSK | 124 | 10 | 16 | 25 | | 9435 |
| NEF | KGGLDGLIYSK | 122 | 11 | 16 | 25 | | 9436 |
| NEF | RFPLTFGWCF | 216 | 10 | 17 | 27 | | 9437 |
| NEF | RFPLTFGWCF | 216 | 11 | 17 | 27 | | 9438 |
| NEF | ADCAWLEA | 74 | 8 | 17 | 27 | | 9439 |
| NEF | FFPDWQNY | 199 | 8 | 17 | 27 | | 9440 |
| NEF | LLIIPMSQII | 257 | 8 | 17 | 27 | | 9441 |
| NEF | NADCAWLEA | 73 | 9 | 17 | 27 | | 9442 |
| NEF | GFFPDWQNY | 198 | 9 | 17 | 27 | | 9443 |
| NEF | YTPGPGIRY | 207 | 9 | 17 | 27 | | 9444 |
| NEF | FDLSFFLKEK | 112 | 10 | 17 | 27 | | 9445 |
| NEF | QGFFPDWQNY | 196 | 10 | 17 | 27 | | 9446 |
| NEF | AFDLSFFLKEK | 111 | 11 | 17 | 27 | | 9447 |
| NEF | FDLSFFLK | 112 | 8 | 18 | 28 | | 9448 |
| NEF | LLIIPICQII | 257 | 8 | 8 | 28 | | 9449 |
| NEF | AFDLSFFLK | 111 | 9 | 18 | 28 | | 9450 |
| NEF | GGLEGLIY | 124 | 8 | 19 | 30 | | 9451 |
| NEF | KGGLEGLIY | 122 | 9 | 19 | 30 | | 9452 |
| NEF | DILDLWVY | 185 | 8 | 20 | 31 | | 9453 |
| NEF | YTPGPGIR | 207 | 8 | 20 | 31 | | 9454 |
| NEF | QDILDLWVY | 184 | 9 | 20 | 31 | | 9455 |
| NEF | PLRPMTYKAA | 102 | 10 | 20 | 31 | | 9456 |
| NEF | QVPLRPMTYK | 100 | 11 | 20 | 31 | | 9457 |
| NEF | PAAEGVGA | 41 | 8 | 21 | 33 | | 9458 |
| NEF | GGLDGLIY | 124 | 8 | 21 | 33 | | 9459 |
| NEF | WVYHTQGY | 191 | 8 | 21 | 33 | | 9460 |
| NEF | YTPGPGTR | 207 | 8 | 21 | 33 | | 9461 |
| NEF | PLRPMTYKA | 102 | 9 | 21 | 33 | | 9462 |
| NEF | KGGLDGLIY | 122 | 9 | 21 | 33 | | 9463 |
| NEF | WVYIITQGYF | 191 | 9 | 21 | 33 | | 9464 |
| NEF | DLWVYIITQGY | 188 | 10 | 21 | 33 | | 9465 |
| NEF | LDLWVYIITQG | 187 | 11 | 21 | 33 | | 9466 |
| NEF | DLWVYHTQGY | 188 | 11 | 21 | 33 | | 9467 |
| NEF | LSFFLKEK | 114 | 8 | 22 | 34 | | 9468 |
| NEF | ELIIPEYYK | 324 | 8 | 22 | 34 | | 9469 |
| NEF | DLSFFLKEK | 113 | 9 | 22 | 34 | | 9470 |
| NEF | EILDLWVYH | 185 | 9 | 22 | 34 | | 9471 |
| NEF | GLIYSKKR | 173 | 8 | 23 | 36 | | 9472 |
| NEF | PLRPMTYKGA | 102 | 10 | 25 | 39 | | 9473 |
| NEF | AITSSNTA | 63 | 8 | 27 | 42 | | 9474 |
| NEF | LSHFLKEK | 114 | 8 | 27 | 42 | | 9475 |
| NEF | GAITSSNTA | 62 | 9 | 27 | 42 | | 9476 |
| NEF | DLSHFLKEK | 113 | 9 | 27 | 42 | | 9477 |
| NEF | HGAITSSNTA | 61 | 10 | 27 | 42 | | 9478 |
| NEF | EILDLWVY | 185 | 8 | 33 | 52 | | 9479 |
| NEF | ILDLWVYII | 186 | 8 | 34 | 53 | | 9480 |
| NEF | YFPDWQNY | 199 | 8 | 36 | S6 | | 9481 |
| NEF | QGYFPDWQNY | 196 | 10 | 36 | 56 | 0.0004 | 9482 |
| NEF | LTFGWCFK | 221 | 8 | 39 | 61 | | 9483 |
| NEF | PLTFGWCFK | 219 | 9 | 39 | 61 | | 9484 |
| NEF | PLTFGWCF | 219 | 8 | 43 | 67 | | 9485 |
| NEF | QVPLRPMTY | 100 | 9 | 46 | 72 | | 9486 |
| NEF | QVPLRPMTYK | 100 | 10 | 46 | 72 | 0.6100 | 9487 |
| NEF | PVRPQVPLR | 95 | 9 | 48 | 75 | | 9488 |
| NEF | CFPVRPQVPLR | 93 | 11 | 48 | 75 | | 9489 |
| NEF | PLRPMTYK | 102 | 8 | 49 | 77 | 0.0010 | 9490 |
| POL | STNSPTSR | 32 | 8 | 01 | 33 | | 9491 |
| POL | RANSPSSR | 35 | 8 | 01 | 33 | | 9492 |
| POL | NSTNSPTSR | 31 | 9 | 01 | 33 | | 9493 |
| POL | PTSRELQVR | 36 | 9 | 01 | 33 | | 9494 |
| POL | QTRANSPSSR | 33 | 10 | 01 | 33 | | 9495 |
| POL | QTRANSPTTR | 35 | 10 | 01 | 33 | | 9496 |
| POL | NSPTSRELQVR | 34 | 11 | 01 | 33 | | 9497 |
| POL | RANSPITR | 37 | 8 | 01 | 50 | | 9498 |
| POL | PSSRELQVR | 39 | 9 | 01 | 50 | | 9499 |
| POL | PSRANSPTSR | 24 | 10 | 01 | 50 | | 9500 |
| POL | NSPSSRELQVR | 37 | 11 | 01 | 50 | | 9501 |
| POL | NSPTTRELQV | 39 | 11 | 01 | 50 | | 9502 |
| POL | ADRQGIVSF | 71 | 9 | 01 | 20 | | 9503 |
| POL | DDRQGPVSF | 71 | 9 | 01 | 20 | | 9504 |
| POL | GADRQGIVSF | 70 | 10 | 01 | 20 | | 9505 |
| POL | GDDRQGPVSF | 70 | 10 | 01 | 20 | | 9506 |
| POL | ADRQGIVSFNF | 71 | 11 | 01 | 20 | | 9507 |
| POL | DDRQGPVSFSF | 71 | 11 | 01 | 20 | | 9508 |
| POL | AGADRQGIVSF | 69 | 11 | 01 | 17 | | 9509 |
| POL | AGDDRQGPVS | 69 | 11 | 01 | 17 | | 9510 |
| POL | GTTLNFPQITF | 79 | 11 | 01 | 17 | | 9511 |
| POL | NLAFPQGEA | 5 | 9 | 10 | 16 | | 9512 |
| POL | NLAFPQGEAR | 5 | 10 | 10 | 16 | | 9513 |
| POL | KTGKYAKMRT | 542 | 11 | 10 | 16 | | 9514 |
| POL | ILIEICGII | 149 | 8 | 10 | 16 | | 9515 |
| POL | LIEICGIIK | 150 | 8 | 10 | 16 | | 9516 |
| POL | YAKMRTAII | 546 | 8 | 10 | 16 | | 9517 |
| POL | LIEICGHKA | 150 | 9 | 10 | 16 | | 9518 |
| POL | RSAHTNDVK | 550 | 9 | 10 | 16 | | 9519 |
| POL | AFPQGEAREF | 7 | 10 | 10 | 16 | | 9520 |
| POL | LIEALLDTGA | 106 | 10 | 10 | 16 | | 9521 |
| POL | TGKYAKMRTA | 543 | 10 | 10 | 16 | | 9522 |
| POL | ETWETWWTD | 588 | 10 | 10 | 16 | | 9523 |
| POL | ETWETWWTE | 588 | 10 | 10 | 16 | | 9524 |
| POL | ETWWTDYWQ | 591 | 10 | 10 | 16 | | 9525 |
| POL | VSLTDTTNQK | 659 | 10 | 10 | 16 | | 9526 |
| POL | LAFPQGEAREF | 6 | 11 | 10 | 16 | | 9527 |
| POL | QLIEALLDTGA | 105 | 11 | 10 | 16 | | 9528 |
| POL | MLTQLGCTLN | 176 | 11 | 10 | 16 | | 9529 |
| POL | TGKYAKMRTA | 543 | 11 | 10 | 16 | | 9530 |
| POL | VVSLTDTTNQ | 658 | 11 | 10 | 16 | | 9531 |
| POL | QTKELQKQIIK | 961 | 11 | 10 | 16 | | 9532 |
| POL | QTRANSPTRR | 21 | 10 | 11 | 18 | | 9533 |
| POL | LDGIDKAQEDII | 754 | 11 | 11 | 17 | | 9534 |
| POL | IGGFIKVK | 137 | 8 | 11 | 17 | | 9535 |
| POL | RIGPENPY | 238 | 8 | 11 | 17 | | 9536 |
| POL | VIPLTEEA | 481 | 8 | 11 | 17 | | 9537 |
| POL | TAHTNDVK | 551 | 8 | 11 | 17 | | 9538 |
| POL | QLTEVVQK | 559 | 8 | 11 | 17 | | 9539 |
| POL | IDKAQEDII | 757 | 8 | 11 | 17 | | 9540 |
| POL | WAGIQQEF | 884 | 8 | 11 | 17 | | 9541 |
| POL | VVPRRKVK | 1012 | 8 | 11 | 17 | | 9542 |
| POL | KIIKDYGK | 1019 | 8 | 11 | 17 | | 9543 |
| POL | GIGGFIKVK | 136 | 9 | 11 | 17 | | 9544 |
| POL | EVIPLTEEA | 480 | 9 | 11 | 17 | | 9545 |
| POL | SLTDTTNQK | 660 | 9 | 11 | 17 | | 9546 |
| POL | GIDKAQEDII | 756 | 9 | 11 | 17 | | 9547 |
| POL | KVVPRRKVK | 1011 | 9 | 11 | 17 | | 9548 |
| POL | GGIGGFIKVK | 135 | 10 | 11 | 17 | | 9549 |
| POL | ISRIGPENPY | 236 | 10 | 11 | 17 | | 9550 |
| POL | STNNETPGIR | 323 | 10 | 11 | 17 | | 9551 |
| POL | ESWTVNDIQK | 439 | 10 | 11 | 17 | | 9552 |
| POL | ETTNQKTELII | 663 | 10 | 11 | 17 | | 9553 |
| POL | DGIDKAQEDH | 755 | 10 | 11 | 17 | | 9554 |
| POL | GSNFTSTTVK | 870 | 10 | 11 | 17 | | 9555 |
| POL | GIQQEFGIPY | 886 | 10 | 11 | 17 | | 9556 |
| POL | SDIQIKELQK | 958 | 10 | 11 | 17 | | 9557 |
| POL | IIKDYGKQMA | 1020 | 10 | 11 | 17 | | 9558 |
| POL | IGGIGGFIKVK | 134 | 11 | 11 | 17 | | 9559 |
| POL | KISRIGPENPY | 235 | 11 | 11 | 17 | | 9560 |
| POL | PSTNNETPGIR | 322 | 11 | 11 | 17 | | 9561 |
| POL | STNNETPGIRY | 323 | 11 | 11 | 17 | | 9562 |
| POL | LTEVIPLTEEA | 478 | 11 | 11 | 17 | | 9563 |
| POL | VVSLTETTNQ | 658 | 11 | 11 | 17 | | 9564 |
| POL | ETTNQKTELII | 663 | 11 | 11 | 17 | | 9565 |
| POL | NGSNFTSTTV | 869 | 11 | 11 | 17 | | 9566 |
| POL | GSNFTSTTVK | 870 | 11 | 11 | 17 | | 9567 |
| POL | ACWWAGIQQE | 881 | 11 | 11 | 17 | | 9568 |
| POL | AGIQQEFGIPY | 885 | 11 | 11 | 17 | | 9569 |
| POL | IDIIASDIQTK | 953 | 11 | 11 | 17 | | 9570 |
| POL | VDIIATDIQTK | 953 | 11 | 11 | 17 | | 9571 |
| POL | ASDIQTKELQK | 957 | 11 | 11 | 17 | | 9572 |
| POL | NSEIKVVPRRK | 1007 | 11 | 11 | 17 | | 9573 |
| POL | KIIKDYGKQMA | 1019 | 11 | 11 | 17 | | 9574 |
| POL | NSLSEAGA | 60 | 8 | 12 | 20 | | 9575 |
| POL | QTRANSPTSR | 21 | 10 | 12 | 19 | | 9576 |
| POL | IIKIQNFR | 969 | 8 | 12 | 19 | | 9577 |
| POL | QIYPGIKVK | 458 | 9 | 12 | 19 | | 9578 |
| POL | QDQWTYQIY | 526 | 9 | 12 | 19 | | 9579 |
| POL | IIKIQNFRVY | 969 | 10 | 12 | 19 | | 9580 |
| POL | ASQIYPGIKVK | 456 | 11 | 12 | 19 | | 9581 |
| POL | IIKIQNFRVYY | 969 | 11 | 12 | 19 | | 9582 |
| POL | LAFPQGEA | 6 | 8 | 12 | 19 | | 9583 |
| POL | LAFPQGKA | 6 | 8 | 12 | 19 | | 9584 |
| POL | AFPQGEAR | 7 | 8 | 12 | 19 | | 9585 |
| POL | KTELQAIY | 668 | 8 | 12 | 19 | | 9586 |
| POL | ELQAIYLA | 670 | 8 | 12 | 19 | | 9587 |
| POL | QIIKIQNF | 968 | 8 | 12 | 19 | | 9588 |
| POL | KDYGKQMA | 1022 | 8 | 12 | 19 | | 9589 |
| POL | LAFPQGEAR | 6 | 9 | 12 | 19 | | 9590 |
| POL | EINLPGKWK | 122 | 9 | 12 | 19 | | 9591 |
| POL | TTNQKIELII | 664 | 9 | 12 | 19 | | 9592 |
| POL | QIIKIQNFR | 968 | 9 | 12 | 19 | | 9593 |
| POL | VIQDNSEIK | 1003 | 9 | 12 | 19 | | 9594 |
| POL | NSEIKVVPR | 1007 | 9 | 12 | 19 | | 9595 |
| POL | VLEEINLPGK | 119 | 10 | 12 | 19 | | 9596 |
| POL | TTNQKTELIIA | 664 | 10 | 12 | 19 | | 9597 |
| POL | KTELQAIYLA | 668 | 10 | 12 | 19 | | 9598 |
| POL | VVIQDNSEIK | 1002 | 10 | 12 | 19 | | 9599 |
| POL | NSEIKVVPRR | 1007 | 10 | 12 | 19 | | 9600 |
| POL | TVLEEINLPGK | 118 | 11 | 12 | 19 | | 9601 |
| POL | EINLPGKWKPK | 122 | 11 | 12 | 19 | | 9602 |
| POL | ELRQIILLRWG | 393 | 11 | 12 | 19 | | 9603 |
| POL | QGQDQWTYQI | 524 | 11 | 12 | 19 | | 9604 |
| POL | RMRGAIITNDV | 548 | 11 | 12 | 19 | | 9605 |
| POL | QIIKIQNFRVY | 968 | 11 | 12 | 19 | | 9606 |
| POL | AVVIQDNSEIK | 1000 | 11 | 12 | 19 | | 9607 |
| POL | QDNSEIKVVPR | 1005 | 11 | 12 | 19 | | 9608 |
| POL | ELQKQIIK | 964 | 8 | 13 | 21 | | 9609 |
| POL | EFSSEQTRA | 16 | 9 | 13 | 21 | | 9610 |
| POL | KTGKYARMR | 542 | 9 | 13 | 21 | | 9611 |
| POL | NLKTGKYARM | 540 | 11 | 13 | 21 | | 9612 |
| POL | KTGKYARMRG | 542 | 11 | 13 | 21 | | 9613 |
| POL | EDINLPGK | 121 | 8 | 13 | 20 | | 9614 |
| POL | IVPLTEEA | 481 | 8 | 13 | 20 | | 9615 |
| POL | TGKYARMR | 543 | 8 | 13 | 20 | | 9616 |
| POL | YARMRGAH | 546 | 8 | 13 | 20 | | 9617 |
| POL | IGQVREQA | 914 | 8 | 13 | 20 | | 9618 |
| POL | QVREQAEII | 916 | 8 | 13 | 20 | | 9619 |
| POL | DINLPGKWK | 122 | 9 | 13 | 20 | | 9620 |
| POL | LIEICGKKA | 150 | 9 | 13 | 20 | | 9621 |
| POL | DIVPLTEEA | 480 | 9 | 13 | 20 | | 9622 |
| POL | IIGQVREQA | 913 | 9 | 13 | 20 | | 9623 |
| POL | VLEDINLPGK | 119 | 10 | 13 | 20 | | 9624 |
| POL | EDINLPGKWK | 121 | 10 | 13 | 20 | | 9625 |
| POL | ILIEICGKKA | 149 | 10 | 13 | 20 | | 9626 |
| POL | RAKILELREH | 388 | 10 | 13 | 20 | | 9627 |
| POL | TVQPIVLPEK | 429 | 10 | 13 | 20 | 0.1600 | 9628 |
| POL | TDIVPLTEEA | 479 | 10 | 13 | 20 | | 9629 |
| POL | TGKYARMRGA | 543 | 10 | 13 | 20 | | 9630 |
| POL | AGRWPVKTIII | 857 | 10 | 13 | 20 | | 9631 |
| POL | KIIGQVREQA | 912 | 10 | 13 | 20 | | 9632 |
| POL | IGQVREQAEH | 914 | 10 | 13 | 20 | | 9633 |
| POL | QVREQAEIILK | 916 | 10 | 13 | 20 | | 9634 |
| POL | EIKVVPRRKA | 1009 | 10 | 13 | 20 | | 9635 |
| POL | TLWQRVLVTV | 91 | 11 | 13 | 20 | | 9636 |
| POL | LVTIKIGGQLK | 97 | 11 | 13 | 20 | | 9637 |
| POL | TVLEDINLPGK | 118 | 11 | 13 | 20 | | 9638 |
| POL | DINLPGKWKP | 122 | 11 | 13 | 20 | | 9639 |
| POL | QILIEICGKKA | 148 | 11 | 13 | 20 | | 9640 |
| POL | KIEELRIEIILLK | 390 | 11 | 13 | 20 | | 9641 |
| POL | WTVQVIPLPEK | 428 | 11 | 13 | 20 | 0.0011 | 9642 |
| POL | LTDIVPLTEEA | 478 | 11 | 13 | 20 | | 9643 |
| POL | TGKYARMRGA | 543 | 11 | 13 | 20 | | 9644 |
| POL | LAGRWPVKTI | 856 | 11 | 13 | 20 | | 9645 |
| POL | IIGQVREQAEII | 913 | 11 | 13 | 20 | | 9646 |
| POL | DSRDPLWKGP | 981 | 11 | 13 | 20 | | 9647 |
| POL | EIKVVPRRKAK | 1009 | 11 | 13 | 20 | | 9648 |
| POL | EFSSEQTR | 16 | 8 | 14 | 22 | | 9649 |
| POL | QIYPGIKVR | 458 | 9 | 14 | 22 | | 9650 |
| POL | ASQIYVGIKVR | 456 | 11 | 14 | 22 | | 9651 |
| POL | IATESIVIWGK | 567 | 11 | 14 | 22 | | 9652 |
| POL | ILIEICGK | 149 | 8 | 14 | 22 | | 9653 |
| POL | LIEICGKK | 150 | 8 | 14 | 22 | | 9654 |
| POL | NFTSTTVK | 872 | 8 | 14 | 22 | | 9655 |
| POL | FTSTTVKA | 873 | 8 | 14 | 22 | | 9656 |
| POL | TSTTVKAA | 874 | 8 | 14 | 22 | | 9657 |
| POL | IASDIQTK | 956 | 8 | 14 | 22 | | 9658 |
| POL | DSRDPLWK | 981 | 8 | 14 | 22 | | 9659 |
| POL | QILIEICGK | 148 | 9 | 14 | 22 | | 9660 |
| POL | ILIEICGKK | 149 | 9 | 14 | 22 | | 9661 |
| POL | NFTSTTVKA | 872 | 9 | 14 | 22 | | 9662 |
| POL | FTSTTVKAA | 873 | 9 | 14 | 22 | 0.0003 | 9663 |
| POL | IIASDIQTK | 955 | 9 | 14 | 22 | | 9664 |
| POL | RDSRDPLWK | 980 | 9 | I4 | 22 | | 9665 |
| POL | RDPLWKGPA | 983 | 9 | 4 | 22 | | 9666 |
| POL | QILIEICGKK | 148 | 10 | 14 | 22 | | 9667 |
| POL | RTKIEELRQH | 388 | 10 | 14 | 22 | | 9668 |
| POL | PGIKVRQLCK | 461 | 10 | 14 | 22 | | 9669 |
| POL | TIHTDNGSNF | 864 | 10 | 14 | 22 | | 9670 |
| POL | NFTSTTVKAA | 872 | 10 | 14 | 22 | | 9671 |
| POL | TTVKAACWW | 876 | 10 | 14 | 22 | 0.0006 | 9672 |
| POL | AGERIVDIIA | 948 | 10 | 14 | 22 | | 9673 |
| POL | DIIASDIQTK | 954 | 10 | 14 | 22 | | 9674 |
| POL | RDPLWKGPAK | 983 | 10 | 14 | 22 | | 9675 |
| POL | FSFPQITLWQR | 85 | 11 | 14 | 22 | | 9676 |
| POL | YDQILIEICGK | 146 | 11 | 14 | 22 | | 9677 |
| POL | ELREIILLKWG | 393 | 11 | 14 | 22 | | 9678 |
| POL | KTPKFKLPIQK | 577 | 11 | 14 | 22 | | 9679 |
| POL | GIDKAQEEHER | 756 | 11 | 14 | 22 | | 9680 |
| POL | STTVKAACW | 875 | 11 | 14 | 22 | | 9681 |
| POL | SAGERIVDIIA | 947 | 11 | 14 | 22 | | 9682 |
| POL | QTRANSPTR | 21 | 9 | 15 | 24 | | 9683 |
| POL | LVEICTEMEK | 221 | 10 | 15 | 24 | 0.0002 | 9684 |
| POL | FFRLDLAF | 1 | 8 | 15 | 23 | | 9685 |
| POL | FSSEQTRA | 17 | 8 | 15 | 23 | | 9686 |
| POL | ELRQIILLR | 393 | 8 | 15 | 23 | | 9687 |
| POL | QGQDQWTY | 524 | 8 | 15 | 23 | | 9688 |
| POL | KTELQAIII | 668 | 8 | 15 | 23 | | 9689 |
| POL | AGIRKVLF | 746 | 8 | 15 | 23 | | 9690 |
| POL | PIQKETWEA | 584 | 9 | 15 | 23 | | 9691 |
| POL | SAGIRKVLF | 745 | 9 | 15 | 23 | | 9692 |
| POL | EIKVVPRRK | 1009 | 9 | 15 | 23 | | 9693 |
| POL | LTQLGCTLNF | 177 | 10 | 15 | 23 | | 9694 |
| POL | KTELQAIIILA | 668 | 10 | 15 | 23 | | 9695 |
| POL | LGIIQAQPDR | 695 | 10 | 15 | 23 | | 9696 |
| POL | VDKLVSAGIR | 740 | 10 | 15 | 23 | | 9697 |
| POL | VSAGIRKVLF | 744 | 10 | 15 | 23 | | 9698 |
| POL | IDKAQEEIIER | 757 | 10 | 15 | 23 | | 9699 |
| POL | ALVEICTEMEK | 220 | 11 | 15 | 23 | | 9700 |
| POL | KIEELRQIILLR | 390 | 11 | 15 | 23 | | 9701 |
| POL | ALGIIQAQPDR | 694 | 11 | 15 | 23 | | 9702 |
| POL | LVNQIIEQLIK | 709 | 11 | 15 | 23 | | 9703 |
| POL | QVDKLVSAGIR | 739 | 11 | 15 | 23 | | 9704 |
| POL | VDKLVSAGIRK | 740 | 11 | 15 | 23 | | 9705 |
| POL | LVSAGIRKVLF | 743 | 11 | 15 | 23 | | 9706 |
| POL | IDKAQEEHERY | 757 | 11 | 15 | 23 | | 9707 |
| POL | KAQEEHER | 759 | 8 | 16 | 25 | | 9708 |
| POL | NLAFQQGEA | 5 | 9 | 16 | 25 | | 9709 |
| POL | KAQEEHERY | 759 | 9 | 16 | 25 | | 9710 |
| POL | NLAFQQGEAR | 5 | 10 | 16 | 25 | | 9711 |
| POL | KAQEEHERYII | 759 | 10 | 16 | 25 | | 9712 |
| POL | LAFQQGEA | 6 | 8 | 16 | 25 | | 9713 |
| POL | AFQQGEAR | 7 | 8 | 16 | 25 | | 9714 |
| POL | RANSPTRR | 26 | 8 | 16 | 25 | | 9715 |
| POL | QLGCTLNF | 179 | 8 | 16 | 25 | | 9716 |
| POL | SAIITNDVK | 551 | 8 | 16 | 25 | | 9717 |
| POL | ELQAIHLA | 670 | 8 | 16 | 25 | | 9718 |
| POL | IIQAQPDR | 697 | 8 | 16 | 25 | | 9719 |
| POL | QVDKLVSA | 739 | 8 | 16 | 25 | | 9720 |
| POL | KLVSAGIR | 742 | 8 | 16 | 25 | | 9721 |
| POL | LVSAGIRK | 743 | 8 | 16 | 25 | 0.0091 | 9722 |
| POL | EIKVVPRR | 1009 | 8 | 16 | 25 | | 9723 |
| POL | LAFQQGEAR | 6 | 9 | 16 | 25 | | 9724 |
| POL | GIIQAQPDR | 696 | 9 | 16 | 25 | | 9725 |
| POL | KLVSAGIRK | 742 | 9 | 16 | 25 | 0.1300 | 9726 |
| POL | QLEKEPIVGA | 620 | 10 | 16 | 25 | | 9727 |
| POL | RANSPTSR | 26 | 8 | 17 | 27 | | 9728 |
| POL | KIEELRQII | 390 | 8 | 17 | 27 | | 9729 |
| POL | ELREHLLK | 393 | 8 | 17 | 27 | | 9730 |
| POL | WGKTPKFK | 575 | 8 | 17 | 27 | | 9731 |
| POL | TIKIGGQLK | 99 | 9 | 17 | 27 | 0.2700 | 9732 |
| POL | VTIKIGGQLK | 98 | 10 | 17 | 27 | 0.0370 | 9733 |
| POL | TVQPIQLPEK | 429 | 10 | 17 | 27 | | 9734 |
| POL | VIWGKTPKFK | 573 | 10 | 17 | 27 | | 9735 |
| POL | TLWQRPLVTI | 91 | 11 | 17 | 27 | | 9736 |
| POL | TIKIGGQLKEA | 99 | 11 | 17 | 27 | | 9737 |
| POL | MLTQIGCTLNF | 176 | 11 | 17 | 27 | | 9738 |
| POL | WTVQPIQLPEK | 428 | 11 | 17 | 27 | | 9739 |
| POL | IVIWGKTPKFK | 572 | 11 | 17 | 27 | | 9740 |
| POL | ETTNQKTELQ | 663 | 11 | 17 | 27 | | 9741 |
| POL | KDFRKYTAF | 311 | 9 | 18 | 29 | | 9742 |
| POL | YFSVPLDKDF | 304 | 10 | 18 | 29 | | 9743 |
| POL | YFSVPLDKDFR | 304 | 11 | 18 | 29 | | 9744 |
| POL | NLKTGKYAKM | 540 | 11 | 18 | 29 | | 9745 |
| POL | SVPLDKDF | 306 | 8 | 18 | 28 | | 9746 |
| POL | PDIVIYQY | 365 | 8 | 18 | 28 | | 9747 |
| POL | FSVPLDKDF | 305 | 9 | 18 | 28 | | 9748 |
| POL | SVPLDKDFR | 306 | 9 | 18 | 28 | | 9749 |
| POL | FSVPLDKDFR | 305 | 10 | 18 | 28 | | 9750 |
| POL | SVPLDKDFRK | 306 | 10 | 18 | 28 | | 9751 |
| POL | AGIKVKQLCK | 461 | 10 | 18 | 28 | | 9752 |
| POL | FSVPLDKDFRK | 305 | 11 | 18 | 28 | | 9753 |
| POL | SVPLDKDFRK | 306 | 11 | 18 | 28 | | 9754 |
| POL | LDKDFRKYTA | 309 | 11 | 18 | 28 | | 9755 |
| POL | YAGIKVKQLCK | 460 | 11 | 18 | 28 | | 9756 |
| POL | LVSQIIEQLIK | 709 | 11 | 18 | 28 | | 9757 |
| POL | PLDKDFRK | 308 | 8 | 19 | 30 | | 9758 |
| POL | KDFRKYTA | 311 | 8 | 19 | 30 | | 9759 |
| POL | PLDKDFRKY | 308 | 9 | 19 | 30 | | 9760 |
| POL | KTGKYAKMR | 542 | 9 | 19 | 30 | | 9761 |
| POL | PLDKDFRKYT | 308 | 11 | 19 | 30 | | 9762 |
| POL | LDKDFRKY | 309 | 8 | 19 | 30 | | 9763 |
| POL | KIEELREII | 390 | 8 | 19 | 30 | | 9764 |
| POL | TGKYAKMR | 543 | 8 | 19 | 30 | | 9765 |
| POL | GAIITNDVK | 551 | 8 | 19 | 30 | | 9766 |
| POL | LTDTTNQK | 661 | 8 | 19 | 30 | | 9767 |
| POL | PLWKGPAK | 985 | 8 | 19 | 30 | | 9768 |
| POL | GIKVRQLCK | 462 | 9 | 19 | 30 | | 9769 |
| POL | RGAHTNDVK | 550 | 9 | 19 | 30 | | 9770 |
| POL | LDKDFRKYTA | 309 | 10 | 19 | 30 | | 9771 |
| POL | KVRQLCKLLR | 464 | 10 | 19 | 30 | | 9772 |
| POL | ATESIVIWGK | 568 | 10 | 19 | 30 | | 9773 |
| POL | VSQIIEQLIK | 710 | 10 | 19 | 30 | 0.0007 | 9774 |
| POL | MAGDDCVASR | 1028 | 10 | 19 | 30 | | 9775 |
| POL | VSQIIEQLIKK | 710 | 11 | 19 | 30 | | 9776 |
| POL | QLIKKEKVYLA | 716 | 11 | 19 | 30 | | 9777 |
| POL | QMAGDDCVAS | 1027 | 11 | 19 | 30 | | 9778 |
| POL | QIYAGIKVK | 458 | 9 | 20 | 32 | | 9779 |
| POL | KVYLAWVPA | 722 | 9 | 20 | 32 | 0.0750 | 9780 |
| POL | KVYLAWVPAH | 722 | 10 | 20 | 32 | 0.0280 | 9781 |
| POL | KAACWWAGIK | 879 | 10 | 20 | 32 | 0.0300 | 9782 |
| POL | ASQIYAGIKVK | 456 | 11 | 20 | 32 | | 9783 |
| POL | KVYLAWVPAII | 722 | 11 | 20 | 32 | 8.6000 | 9784 |
| POL | KFKLPIQK | 580 | 8 | 20 | 31 | | 9785 |
| POL | GDDCVASR | 1030 | 8 | 20 | 31 | | 9786 |
| POL | AGDDCVASR | 1029 | 9 | 20 | 31 | | 9787 |
| POL | VSLTETTNQK | 659 | 10 | 20 | 31 | | 9788 |
| POL | LIKKEKVYLA | 717 | 10 | 20 | 31 | | 9789 |
| POL | LLKLAGRWPV | 853 | 11 | 20 | 31 | | 9790 |
| POL | YFSVPLDK | 304 | 8 | 21 | 33 | | 9791 |
| POL | KVIIITDNGSNF | 863 | 11 | 21 | 33 | | 9792 |
| POL | ACWWAGIK | 881 | 8 | 21 | 33 | | 9793 |
| POL | WAGIKQEF | 884 | 8 | 21 | 33 | | 9794 |
| POL | SLTETTNQK | 660 | 9 | 21 | 33 | | 9795 |
| POL | AACWWAGIK | 880 | 9 | 21 | 33 | 0.0130 | 9796 |
| POL | DAYFSVPLDK | 302 | 10 | 21 | 33 | | 9797 |
| POL | DLEIGQIIRTK | 381 | 10 | 21 | 33 | | 9798 |
| POL | QLCKLLRGTK | 467 | 10 | 21 | 33 | | 9799 |
| POL | SDFNLPPIVA | 776 | 10 | 21 | 33 | | 9800 |
| POL | LLTQIGCTLNF | 176 | 11 | 21 | 33 | | 9801 |
| POL | IFAIKKKDSTK | 249 | 11 | 21 | 33 | | 9802 |
| POL | GDAYFSVPLD | 301 | 11 | 21 | 33 | | 9803 |
| POL | SDLEIGQIIRTK | 380 | 11 | 21 | 33 | | 9804 |
| POL | QLCKLLRGTK | 467 | 11 | 21 | 33 | | 9805 |
| POL | ASDFNLPPIVA | 775 | 11 | 21 | 33 | | 9806 |
| POL | SDFNLPPIVAK | 776 | 11 | 21 | 33 | | 9807 |
| POL | ACWWAGIKQE | 881 | 11 | 21 | 33 | | 9808 |
| POL | AGIKQEFGIPY | 885 | 11 | 21 | 33 | | 9809 |
| POL | EDFRKYTA | 311 | 8 | 22 | 35 | | 9810 |
| POL | EDFRKYTAF | 311 | 9 | 22 | 35 | | 9811 |
| POL | EIGQIIRTK | 383 | 8 | 22 | 34 | | 9812 |
| POL | RTKIEELR | 388 | 8 | 22 | 34 | | 9813 |
| POL | YLAWVPAH | 724 | 8 | 22 | 34 | | 9814 |
| POL | LAWVPAHK | 725 | 8 | 22 | 34 | | 9815 |
| POL | YLAWVPAIIK | 724 | 9 | 22 | 34 | 0.0770 | 9816 |
| POL | NFPQITLWQR | 86 | 10 | 22 | 34 | | 9817 |
| POL | MTKILEPFRK | 353 | 10 | 22 | 34 | 0.0150 | 9818 |
| POL | KVILVAVHVA | 823 | 10 | 22 | 34 | | 9819 |
| POL | AGRWPVKVIH | 857 | 10 | 22 | 34 | | 9820 |
| POL | GIKQEFGIPY | 886 | 10 | 22 | 34 | 0.0002 | 9821 |
| POL | SMTKILEPFRK | 352 | 11 | 22 | 34 | | 9822 |
| POL | KTPKFRLPIQK | 577 | 11 | 22 | 34 | | 9823 |
| POL | LAGRWPVKVI | 856 | 11 | 22 | 34 | | 9824 |
| POL | KVYLSWVPA | 722 | 9 | 23 | 37 | | 9825 |
| POL | KVYLSWVPAII | 722 | 10 | 23 | 37 | | 9826 |
| POL | KVYLSWVPAII | 722 | 11 | 23 | 37 | | 9827 |
| POL | KILEPFRK | 355 | 8 | 23 | 36 | | 9828 |
| POL | EGKVILVA | 821 | 8 | 23 | 36 | | 9829 |
| POL | KVILVAVH | 823 | 8 | 23 | 36 | | 9830 |
| POL | KIGGQLKEA | 101 | 9 | 23 | 36 | | 9831 |
| POL | DFNLPPIVA | 777 | 9 | 23 | 36 | | 9832 |
| POL | VILVAVIIVA | 824 | 9 | 23 | 36 | | 9833 |
| POL | TVKAACWWA | 877 | 9 | 23 | 36 | | 9834 |
| POL | SFPQITLWQR | 86 | 10 | 23 | 36 | | 9835 |
| POL | DFNLPPIVAK | 777 | 10 | 23 | 36 | | 9836 |
| POL | IILEGKVILVA | 819 | 10 | 23 | 36 | | 9837 |
| POL | EGKVILVAVH | 821 | 10 | 23 | 36 | | 9838 |
| POL | LLKWGFTTPD | 398 | 11 | 23 | 36 | | 9839 |
| POL | LLRWGFTTPD | 398 | 11 | 23 | 36 | | 9840 |
| POL | IDIIATDIQTK | 953 | 11 | 23 | 36 | | 9841 |
| POL | KLLRGTKA | 470 | 8 | 24 | 38 | | 9842 |
| POL | NTPIFAIK | 246 | 8 | 24 | 38 | | 9843 |
| POL | GDDCVAGR | 1030 | 8 | 24 | 38 | | 9844 |
| POL | NTPIFAIKK | 246 | 9 | 24 | 38 | | 9845 |
| POL | LCKLLRGTK | 468 | 9 | 24 | 38 | 0.0004 | 9846 |
| POL | AGDDCVAGR | 1029 | 9 | 24 | 38 | | 9847 |
| POL | NTPIFAIKKK | 246 | 10 | 24 | 38 | | 9848 |
| POL | LCKLLRGTKA | 468 | 10 | 24 | 38 | | 9849 |
| POL | VIIITDNGSNF | 864 | 10 | 24 | 38 | | 9850 |
| POL | MAGDDCVAGR | 1028 | 10 | 24 | 38 | | 9851 |
| POL | QLCKLLRGAK | 467 | 11 | 24 | 38 | | 9852 |
| POL | QGQGQWTYQI | 524 | 11 | 24 | 38 | | 9853 |
| POL | KLGKAGYVTD | 643 | 11 | 24 | 38 | | 9854 |
| POL | TAYFLLKLAG | 849 | 11 | 24 | 38 | | 9855 |
| POL | QMAGDDCVAG | 1027 | 11 | 24 | 38 | | 9856 |
| POL | KLLRGAKA | 470 | 8 | 25 | 40 | | 9857 |
| POL | QGQWTYQIY | 526 | 9 | 25 | 40 | 0.0004 | 9858 |
| POL | IGGQLKEA | 102 | 8 | 25 | 39 | | 9859 |
| POL | PIFAIKKK | 248 | 8 | 25 | 39 | | 9860 |
| POL | QGQGQWTY | 524 | 8 | 25 | 39 | | 9861 |
| POL | FLLKLAGR | 852 | 8 | 25 | 39 | | 9862 |
| POL | QLCKLLRGA | 467 | 9 | 25 | 39 | | 9863 |
| POL | PIVAKEIVA | 782 | 9 | 25 | 39 | | 9864 |
| POL | YFLLKLAGR | 851 | 9 | 25 | 39 | | 9865 |
| POL | QLCKLLRGAK | 467 | 10 | 25 | 39 | | 9866 |
| POL | LCKLLRGAKA | 468 | 10 | 25 | 39 | | 9867 |
| POL | LGKAGYVTDR | 644 | 10 | 25 | 39 | | 9868 |
| POL | IDKAQEEIIEK | 757 | 10 | 25 | 39 | | 9869 |
| POL | SDFNLPPVVA | 776 | 10 | 25 | 39 | | 9870 |
| POL | PSKDLIAEIQK | 513 | 11 | 25 | 39 | | 9871 |
| POL | DTTNQKTELQ | 663 | 11 | 25 | 39 | | 9872 |
| POL | GIDKAQEEHEK | 756 | 11 | 25 | 39 | | 9873 |
| POL | IDKAQEEIIEKY | 757 | 11 | 25 | 39 | | 9874 |
| POL | ASDFNLPPVVA | 775 | 11 | 25 | 39 | | 9875 |
| POL | SDFNLPPVVAK | 776 | 11 | 25 | 39 | | 9876 |
| POL | RAKIEELR | 388 | 8 | 26 | 41 | | 9877 |
| POL | LCKLLRGA | 468 | 8 | 26 | 41 | | 9878 |
| POL | KFRLPIQK | 580 | 8 | 26 | 41 | | 9879 |
| POL | NLPPIVAK | 779 | 8 | 26 | 41 | | 9880 |
| POL | IVAKEIVA | 783 | 8 | 26 | 41 | | 9881 |
| POL | LCKLLRGAK | 468 | 9 | 26 | 41 | | 9882 |
| POL | LTEAVQKIA | 560 | 9 | 26 | 41 | | 9883 |
| POL | SSGIRKVLF | 745 | 9 | 26 | 41 | | 9884 |
| POL | DFNLPPVVA | 777 | 9 | 26 | 41 | | 9885 |
| POL | QLTEAVQKIA | 559 | 10 | 26 | 41 | | 9886 |
| POL | VSSGIRKVLF | 744 | 10 | 26 | 41 | | 9887 |
| POL | DFNLPPVVAK | 777 | 10 | 26 | 41 | | 9888 |
| POL | GSNFTSAAVK | 870 | 10 | 26 | 41 | | 9889 |
| POL | LVSSGIRKVLF | 743 | 11 | 26 | 41 | | 9890 |
| POL | TGQETAYFLL | 845 | 11 | 26 | 41 | | 9891 |
| POL | NGSNFTSAAV | 869 | 11 | 26 | 41 | | 9892 |
| POL | GSNFTSAAVK | 870 | 11 | 26 | 41 | | 9893 |
| POL | KAQEEIIEK | 759 | 8 | 27 | 43 | | 9894 |
| POL | ASQIYAGIK | 456 | 9 | 27 | 43 | 0.0013 | 9895 |
| POL | KAQEEIIEKY | 759 | 9 | 27 | 43 | | 9896 |
| POL | KAQEEIIEKYII | 759 | 10 | 27 | 43 | | 9897 |
| POL | EICTEMEK | 223 | 8 | 27 | 42 | | 9898 |
| POL | EIGQIIRAK | 383 | 8 | 27 | 42 | | 9899 |
| POL | LVSSGIRK | 743 | 8 | 27 | 42 | | 9900 |
| POL | SGIRKVLF | 746 | 8 | 27 | 42 | | 9901 |
| POL | NLPPVVAK | 779 | 8 | 27 | 42 | | 9902 |
| POL | ETAYFLLK | 848 | 8 | 27 | 42 | 0.0037 | 9903 |
| POL | TSAAVKAA | 874 | 8 | 27 | 42 | | 9904 |
| POL | KLVSSGIRK | 742 | 9 | 27 | 42 | | 9905 |
| POL | TAYFLLKLA | 849 | 9 | 27 | 42 | 0.0027 | 9906 |
| POL | FTSAAVKAA | 873 | 9 | 27 | 42 | | 9907 |
| POL | DLEIGQIIRAK | 381 | 10 | 27 | 42 | | 9908 |
| POL | KLNWASQIYA | 452 | 10 | 27 | 42 | 0.0052 | 9909 |
| POL | WASQIYAGIK | 455 | 10 | 27 | 42 | | 9910 |
| POL | KVKQLCKLLR | 464 | 10 | 27 | 42 | | 9911 |
| POL | ETAYFLLKLA | 848 | 10 | 27 | 42 | | 9912 |
| POL | NFTSAAVKAA | 872 | 10 | 27 | 42 | | 9913 |
| POL | EICTEMEKEGK | 223 | 11 | 27 | 42 | | 9914 |
| POL | SDLEIGQIIRAK | 380 | 11 | 27 | 42 | | 9915 |
| POL | VDKLVSSGIRK | 740 | 11 | 27 | 42 | | 9916 |
| POL | ASQIYPGIK | 456 | 9 | 28 | 44 | | 9917 |
| POL | KDLIAEIQK | 515 | 9 | 28 | 44 | | 9918 |
| POL | NLKTGKYAK | 540 | 9 | 28 | 44 | | 9919 |
| POL | DLIAEIQK | 516 | 8 | 28 | 44 | | 9920 |
| POL | PIVGAETF | 625 | 8 | 28 | 44 | | 9921 |
| POL | IVGAETFY | 626 | 8 | 28 | 44 | | 9922 |
| POL | GSNFTSAA | 870 | 8 | 28 | 44 | | 9923 |
| POL | NFTSAAVK | 872 | 8 | 28 | 44 | | 9924 |
| POL | FTSAAVKA | 873 | 8 | 28 | 44 | | 9925 |
| POL | CTEMEKEGK | 225 | 9 | 28 | 44 | 0.0002 | 9926 |
| POL | DLEIGQIIRA | 381 | 9 | 28 | 44 | | 9927 |
| POL | GIKVKQLCK | 462 | 9 | 28 | 44 | | 9928 |
| POL | PIVGAETFY | 625 | 9 | 28 | 44 | | 9929 |
| POL | QLIKKEKVY | 716 | 9 | 28 | 44 | | 9930 |
| POL | PYVAKEIVA | 782 | 9 | 28 | 44 | | 9931 |
| POL | NGSNFTSAA | 869 | 9 | 28 | 44 | | 9932 |
| POL | NFTSAAVKA | 872 | 9 | 28 | 44 | | 9933 |
| POL | ICTEMEKEGK | 224 | 10 | 28 | 44 | | 9934 |
| POL | SDLEIGQIIRA | 380 | 10 | 28 | 44 | | 9935 |
| POL | WASQIYPGIK | 455 | 10 | 28 | 44 | | 9936 |
| POL | AAVKAACWW | 876 | 10 | 28 | 44 | | 9937 |
| POL | GSDLEIGQIIRA | 379 | 11 | 28 | 44 | | 9938 |
| POL | VGAEIFYVDG | 627 | 11 | 28 | 44 | | 9939 |
| POL | TDNGSNFTSA | 867 | 11 | 28 | 44 | | 9940 |
| POL | SAAVKAACW | 875 | 11 | 28 | 44 | | 9941 |
| POL | NLKTGKYAR | 540 | 9 | 29 | 46 | 0.0008 | 9942 |
| POL | KLVSSGIR | 742 | 8 | 29 | 45 | | 9943 |
| POL | VIWGKTPKFR | 573 | 10 | 29 | 45 | | 9944 |
| POL | VDKLVSSGIR | 740 | 10 | 29 | 45 | | 9945 |
| POL | PLTEAELELA | 483 | 11 | 29 | 45 | | 9946 |
| POL | IVIWGKTPKFR | 572 | 11 | 29 | 45 | | 9947 |
| POL | QVDKLVSSGIR | 739 | 11 | 29 | 45 | | 9948 |
| POL | WGKTPKFR | 575 | 8 | 30 | 47 | | 9949 |
| POL | LTETTNQK | 661 | 8 | 30 | 47 | | 9950 |
| POL | IILVAVIIVA | 824 | 9 | 30 | 47 | | 9951 |
| POL | AANRETKLGK | 637 | 10 | 30 | 47 | 0.0007 | 9952 |
| POL | IIEQLIKKEK | 713 | 10 | 30 | 47 | 0.0004 | 9953 |
| POL | KIILVAVIIVA | 823 | 10 | 30 | 47 | | 9954 |
| POL | GAANRETKLG | 636 | 11 | 30 | 47 | | 9955 |
| POL | AANRETKLGK | 637 | 11 | 30 | 47 | | 9956 |
| POL | QIIEQLIKKEK | 712 | 11 | 30 | 47 | | 9957 |
| POL | ILKLAGRWPV | 853 | 11 | 30 | 47 | | 9958 |
| POL | VVAKEIVA | 783 | 8 | 31 | 48 | | 9959 |
| POL | EGKIILVA | 821 | 8 | 31 | 48 | | 9960 |
| POL | KIILYAVII | 823 | 8 | 31 | 48 | | 9961 |
| POL | ETAYFILK | 848 | 8 | 31 | 48 | | 9962 |
| POL | YFILKLAGR | 851 | 9 | 31 | 48 | | 9963 |
| POL | HLEGKIILVA | 819 | 10 | 31 | 48 | | 9964 |
| POL | EGKIILVAVII | 821 | 10 | 31 | 48 | | 9965 |
| POL | ETAYFILKLA | 848 | 10 | 31 | 48 | | 9966 |
| POL | PSINNETPGIR | 322 | 11 | 31 | 48 | | 9967 |
| POL | TGQETAYFILK | 845 | 11 | 31 | 48 | | 9968 |
| POL | TAYFILKLAGR | 849 | 11 | 31 | 48 | | 9969 |
| POL | FILKLAGR | 852 | 8 | 32 | 50 | | 9970 |
| POL | NDVKQLTEA | 555 | 9 | 32 | 50 | | 9971 |
| POL | TAYFILKLA | 849 | 9 | 32 | 50 | | 9972 |
| POL | AVKAACWWA | 877 | 9 | 32 | 50 | | 9973 |
| POL | SINNETPGIR | 323 | 10 | 32 | 50 | | 9974 |
| POL | SINNETPGIRY | 323 | 11 | 32 | 50 | | 9975 |
| POL | SSMTKILEPFR | 351 | 11 | 32 | 50 | | 9976 |
| POL | HTNDVKQLTE | 553 | 11 | 32 | 50 | | 9977 |
| POL | IISNWRAMAS | 768 | 11 | 32 | 50 | | 9978 |
| POL | QTKELQKQITK | 961 | 11 | 32 | 50 | 0.0050 | 9979 |
| POL | DVKQLTEA | 556 | 8 | 33 | 52 | | 9980 |
| POL | NGSNFTSA | 869 | 8 | 33 | 52 | | 9981 |
| POL | EMEKEGKISK | 229 | 10 | 33 | 52 | 0.0004 | 9982 |
| POL | SSMTKILEPF | 351 | 10 | 33 | 52 | 0.0004 | 9983 |
| POL | TDNGSNFTSA | 867 | 10 | 33 | 52 | | 9984 |
| POL | QSSMTKILEPF | 350 | 11 | 33 | 52 | | 9985 |
| POL | DVKQLTEAVQ | 556 | 11 | 33 | 52 | 0.0048 | 9986 |
| POL | IITDNGSNFTS | 866 | 11 | 33 | 52 | | 9987 |
| POL | YDPSKDLIA | 511 | 9 | 34 | 53 | | 9988 |
| POL | DIIATDIQTK | 954 | 10 | 34 | 53 | 0.0056 | 9989 |
| POL | QLKEALLDTG | 105 | 11 | 34 | 53 | | 9990 |
| POL | ELQKQITK | 964 | 8 | 35 | 56 | | 9991 |
| POL | LIKKEKVY | 717 | 8 | 35 | 55 | | 9992 |
| POL | QITKIQNF | 968 | 8 | 35 | 55 | | 9993 |
| POL | DSRDPIWK | 981 | 8 | 35 | 55 | | 9994 |
| POL | ETKLGKAGY | 641 | 9 | 35 | 55 | | 9995 |
| POL | IIATDIQTK | 955 | 9 | 35 | 55 | 0.0250 | 9996 |
| POL | QITKIQNFR | 968 | 9 | 35 | 55 | 0.0021 | 9997 |
| POL | RDSRDPIWK | 980 | 9 | 35 | 55 | | 9998 |
| POL | TDIQTKELQK | 958 | 10 | 35 | 55 | 0.0007 | 9999 |
| POL | RDPIWKGPAK | 983 | 10 | 35 | 55 | | 10000 |
| POL | ATDIQTKELQK | 957 | 11 | 35 | 55 | 0.0051 | 10001 |
| POL | QITKIQNFRVY | 968 | 11 | 35 | 55 | | 10002 |
| POL | DSRDPIWKGP | 981 | 11 | 35 | 55 | | 10003 |
| POL | SDIKVVPRRKA | 1008 | 11 | 35 | 55 | | 10004 |
| POL | ITKIQNFR | 969 | 11 | 36 | 57 | | 10005 |
| POL | ITKIQNFRVY | 969 | 10 | 36 | 57 | 0.0016 | 10006 |
| POL | ITKIQNFRVYY | 969 | 11 | 36 | 57 | | 10007 |
| POL | IATDIQTK | 956 | 8 | 36 | 56 | | 10008 |
| POL | PIWKGPAK | 985 | 8 | 36 | 56 | | 10009 |
| POL | NLPGKWKPK | 124 | 9 | 36 | 56 | | 10010 |
| POL | AIFQSSMTK | 347 | 9 | 36 | 56 | 1.1000 | 10011 |
| POL | PAIFQSSMTK | 346 | 10 | 36 | 56 | 0.0760 | 10012 |
| POL | LTEEAELELA | 484 | 10 | 36 | 56 | | 10013 |
| POL | VFAIKKKDSTK | 249 | 11 | 36 | 56 | | 10014 |
| POL | NTPVFAIK | 246 | 8 | 37 | 58 | 0.0003 | 10015 |
| POL | PVFAIKKK | 248 | 8 | 37 | 58 | 0.0003 | 10016 |
| POL | QLTEAVQK | 559 | 8 | 37 | 58 | | 10017 |
| POL | QIIEQLIK | 712 | 8 | 37 | 58 | | 10018 |
| POL | IIEQLIKK | 713 | 8 | 37 | 58 | | 10019 |
| POL | YLSWVPAII | 724 | 8 | 37 | 58 | | 10020 |
| POL | LSWVPAIIK | 725 | 8 | 37 | 58 | | 10021 |
| POL | NTPVFAIKK | 246 | 9 | 37 | 58 | 0.0330 | 10022 |
| POL | QIIEQLIKK | 712 | 9 | 37 | 58 | 0.0091 | 10023 |
| POL | YLSWVPAIIK | 724 | 9 | 37 | 58 | | 10024 |
| POL | RDPIWKGPA | 983 | 9 | 37 | 58 | | 10025 |
| POL | VIQDNSDIK | 1003 | 9 | 37 | 58 | 0.0009 | 10026 |
| POL | NTPVFAIKKK | 246 | 10 | 37 | 58 | 0.0006 | 10027 |
| POL | VVIQDNSDIK | 1002 | 10 | 37 | 58 | 0.0005 | 10028 |
| POL | AVVIQDNSDIK | 1000 | 11 | 37 | 58 | 0.0004 | 10029 |
| POL | IFQSSMTK | 348 | 8 | 38 | 59 | 0.0055 | 10030 |
| POL | ILKEPVIIGVYY | 498 | 11 | 38 | 59 | | 10031 |
| POL | LDGIDKAQEEII | 754 | 11 | 39 | 62 | | 10032 |
| POL | IISNWRAMA | 768 | 8 | 39 | 61 | | 10033 |
| POL | AGYVIDRGR | 647 | 9 | 39 | 61 | | 10034 |
| POL | YVTDRGRQK | 649 | 9 | 39 | 61 | 0.0011 | 10035 |
| POL | KAGYVTDRGR | 646 | 10 | 39 | 61 | | 10036 |
| POL | LGIIQAQVDK | 695 | 10 | 39 | 61 | 0.0007 | 10037 |
| POL | DGIDKAQEEII | 755 | 10 | 39 | 61 | | 10038 |
| POL | DIKVVVRRKA | 1009 | 10 | 39 | 61 | | 10039 |
| POL | VVIIGVYYDPS | 505 | 11 | 39 | 61 | | 10040 |
| POL | AGYVTDRGRQ | 647 | 11 | 39 | 61 | | 10041 |
| POL | ALGIIQAQPDK | 694 | 11 | 39 | 61 | | 10042 |
| POL | DIKVVPRRKAK | 1009 | 11 | 39 | 61 | | 10043 |
| POL | VTDRGRQK | 650 | 8 | 40 | 63 | 0.0090 | 10044 |
| POL | IIQAQPDK | 697 | 8 | 40 | 63 | | 10045 |
| POL | GIIQAQVDK | 696 | 9 | 40 | 63 | 0.0009 | 10046 |
| POL | GIDKAQEEII | 756 | 9 | 40 | 63 | | 10047 |
| POL | NSDIKVVVR | 1007 | 9 | 40 | 63 | | 10048 |
| POL | ILKEPVHGVY | 498 | 10 | 40 | 63 | | 10049 |
| POL | NSDIKVVPRR | 1007 | 10 | 40 | 63 | 0.0007 | 10050 |
| POL | EILKEPVIIGVY | 497 | 11 | 40 | 63 | | 10051 |
| POL | WTYQIYQEPF | 529 | 11 | 40 | 63 | 0.9200 | 10052 |
| POL | QIYQIEPFKNLK | 532 | 11 | 40 | 63 | 0.2800 | 10053 |
| POL | SAGERIIDIIA | 947 | 11 | 40 | 63 | | 10054 |
| POL | QDNSDIKVVPR | 1005 | 11 | 40 | 63 | | 10055 |
| POL | NSDIKVVPRRK | 1007 | 11 | 40 | 63 | | 10056 |
| POL | ESIVIWGKTPK | 570 | 11 | 41 | 65 | | 10057 |
| POL | FFRENLAF | 1 | 8 | 41 | 64 | | 10058 |
| POL | QIGCTLNF | 179 | 8 | 41 | 64 | | 10059 |
| POL | QIYQEPFK | 532 | 8 | 41 | 64 | 0.0010 | 10060 |
| POL | IDKAQEIEII | 757 | 8 | 41 | 64 | | 10061 |
| POL | KAKIIRDY | 1017 | 8 | 41 | 64 | | 10062 |
| POL | LTQIGCTLNF | 177 | 10 | 41 | 64 | 0.0081 | 10063 |
| POL | AGERIIDIIA | 948 | 10 | 41 | 64 | | 10064 |
| POL | KAKIIRDYGK | 1017 | 10 | 41 | 64 | 0.0048 | 10065 |
| POL | KISKIGPENPY | 235 | 11 | 41 | 64 | | 10066 |
| POL | SIVIWGKTPKF | 571 | 11 | 41 | 64 | | 10067 |
| POL | DFRKYTAF | 312 | 8 | 42 | 66 | | 10068 |
| POL | KAGYVTDR | 646 | 8 | 42 | 66 | | 10069 |
| POL | ISKIGPENPY | 236 | 10 | 42 | 66 | | 10070 |
| POL | SMTKILEPFR | 352 | 10 | 42 | 66 | 0.0004 | 10071 |
| POL | WTYQIYQEPF | 529 | 10 | 42 | 66 | | 10072 |
| POL | SIVIWGKTPK | 571 | 10 | 42 | 66 | | 10073 |
| POL | TTNQKTELQA | 664 | 10 | 42 | 66 | 0.0004 | 10074 |
| POL | IVIYQYMDDLY | 367 | 11 | 42 | 66 | | 10075 |
| POL | VVPRRKAKIIR | 1012 | 11 | 42 | 66 | | 10076 |
| POL | GVYYDPSK | 508 | 8 | 43 | 67 | | 10077 |
| POL | SCDKCQLK | 791 | 8 | 43 | 67 | | 10078 |
| POL | SMTKILEPF | 352 | 9 | 43 | 67 | 0.0004 | 10079 |
| POL | MTKILEPFR | 353 | 9 | 43 | 67 | 0.0008 | 10080 |
| POL | HGVYYDPSK | 507 | 9 | 43 | 67 | 0.0004 | 10081 |
| POL | ASCDKCQLK | 790 | 9 | 43 | 67 | 0.0027 | 10082 |
| POL | DSWTVNDIQK | 439 | 10 | 43 | 67 | 0.0007 | 10083 |
| POL | TFYVDGAANR | 631 | 10 | 43 | 67 | 0.0003 | 10084 |
| POL | VASCDKCQLK | 789 | 10 | 43 | 67 | 0.0004 | 10085 |
| POL | KIIGQVRDQA | 912 | 10 | 43 | 67 | | 10086 |
| POL | KDSWTVNDIQ | 438 | 11 | 43 | 67 | | 10087 |
| POL | ETFYVDGAAN | 630 | 11 | 43 | 67 | | 10088 |
| POL | IVASCDKCQLK | 788 | 11 | 43 | 67 | 0.0970 | 10089 |
| POL | SCDKCQLKGE | 791 | 11 | 43 | 67 | | 10090 |
| POL | MIKILEPF | 353 | 8 | 44 | 69 | | 10091 |
| POL | IGQVRDQA | 914 | 8 | 44 | 69 | | 10092 |
| POL | SDIKVVPR | 1008 | 8 | 44 | 69 | | 10093 |
| POL | MAGDDCVA | 1028 | 8 | 44 | 69 | | 10094 |
| POL | IIGQVRDQA | 913 | 9 | 44 | 69 | | 10095 |
| POL | SDIKVVPRR | 1008 | 9 | 44 | 69 | 0.0002 | 10096 |
| POL | QMAGDDCVA | 1027 | 9 | 44 | 69 | 0.0003 | 10097 |
| POL | VDGAANRETK | 634 | 10 | 44 | 69 | | 10098 |
| POL | IGQVRDQAEH | 914 | 10 | 44 | 69 | | 10099 |
| POL | QVRDQAEIILK | 916 | 10 | 44 | 69 | 0.0089 | 10100 |
| POL | SDIKVVPRRK | 1008 | 10 | 44 | 69 | 0.0004 | 10101 |
| POL | PFKNLKTGKY | 537 | 11 | 44 | 69 | | 10102 |
| POL | GAETFYVDGA | 628 | 11 | 44 | 69 | | 10103 |
| POL | YVDGAANRET | 633 | 11 | 44 | 69 | | 10104 |
| POL | IIGQVRDQAEII | 913 | 11 | 44 | 69 | | 10105 |
| POL | VAKEIVASCDK | 784 | 11 | 45 | 71 | | 10106 |
| POL | GAANRETK | 636 | 8 | 45 | 70 | | 10107 |
| POL | EIVASCDK | 787 | 8 | 45 | 70 | | 10108 |
| POL | DGAANRETK | 635 | 9 | 45 | 70 | | 10109 |
| POL | PFKNLKTGKY | 537 | 10 | 45 | 70 | 0.0004 | 10110 |
| POL | RDQAEIILKTA | 918 | 10 | 45 | 70 | | 10111 |
| POL | PLVKLWYQLE | 613 | 11 | 45 | 70 | | 10112 |
| POL | EILKEPVII | 497 | 8 | 46 | 72 | | 10113 |
| POL | KLWYQLEK | 616 | 8 | 46 | 72 | | 10114 |
| POL | RDQAEIILK | 918 | 8 | 46 | 72 | | 10115 |
| POL | PFKNLKTGK | 537 | 9 | 46 | 72 | | 10116 |
| POL | DIQTKELQK | 959 | 9 | 46 | 72 | 0.0009 | 10117 |
| POL | LVKLWYQLEK | 614 | 10 | 46 | 72 | 0.0560 | 10118 |
| POL | KVKQWPLTEE | 207 | 11 | 46 | 72 | 0.0750 | 10119 |
| POL | VIWGKTPKF | 573 | 9 | 47 | 73 | | 10120 |
| POL | IVIWGKIPKF | 572 | 10 | 47 | 73 | | 10121 |
| POL | VIWGKTPK | 573 | 8 | 48 | 75 | | 10122 |
| POL | QVRDQAEH | 916 | 8 | 48 | 75 | | 10123 |
| POL | DIKVVPRR | 1009 | 8 | 48 | 75 | | 10124 |
| POL | IVIWGKTPK | 572 | 9 | 48 | 75 | 0.0850 | 10125 |
| POL | DIKVVPRRK | 1009 | 9 | 48 | 75 | 0.0002 | 10126 |
| POL | GAETFYVDGA | 628 | 10 | 48 | 75 | | 10127 |
| POL | KVLFLDGIDK | 750 | 10 | 48 | 75 | 0.3600 | 10128 |
| POL | CDKCQLKGEA | 792 | 10 | 48 | 75 | | 10129 |
| POL | KCQLKGEAMH | 794 | 10 | 48 | 75 | | 10130 |
| POL | VVESMNKELK | 902 | 10 | 48 | 75 | | 10131 |
| POL | KVLFLDGIDKA | 750 | 11 | 48 | 75 | | 10132 |
| POL | GVVESMNKEL | 901 | 11 | 48 | 75 | | 10133 |
| POL | VVESMNKELK | 902 | 11 | 48 | 75 | | 10134 |
| POL | GVVESMNK | 901 | 8 | 49 | 77 | | 10135 |
| POL | RDYGKQMA | 1022 | 8 | 49 | 77 | | 10136 |
| POL | QGVVESMNK | 900 | 9 | 49 | 77 | | 10137 |
| POL | KLKPGMDGPK | 197 | 10 | 49 | 77 | 0.3900 | 10138 |
| POL | IIRDYGKQMA | 1020 | 10 | 49 | 77 | | 10139 |
| POL | QSQGVVESMN | 898 | 11 | 49 | 77 | | 10140 |
| POL | KIIRDYGKQMA | 1019 | 11 | 49 | 77 | | 10141 |
| POL | ESIVIWGK | 570 | 8 | 50 | 79 | | 111142 |
| POL | YVDGAANR | 633 | 8 | 50 | 78 | 0.0003 | 10143 |
| POL | LAGRWPVK | 856 | 8 | 50 | 78 | | 10144 |
| POL | KIIRDYGK | 1019 | 8 | 50 | 78 | | 10145 |
| POL | KLAGRWPVK | 855 | 9 | 50 | 78 | 2.7000 | 10146 |
| POL | GMDGPKVK | 201 | 11 | 51 | 80 | 0.0007 | 10147 |
| POL | KIGPENPY | 238 | 8 | 51 | 80 | | 10148 |
| POL | FTTPDKKII | 403 | 8 | 51 | 80 | | 10149 |
| POL | TFYVDGAA | 631 | 8 | 51 | 80 | | 10150 |
| POL | IITDNGSNF | 866 | 8 | 51 | 80 | | 10151 |
| POL | PGMDGPKVK | 200 | 9 | 51 | 80 | 0.0004 | 10152 |
| POL | GFTTPDKKII | 402 | 9 | 51 | 80 | | 10153 |
| POL | ETFYVDGAA | 630 | 9 | 51 | 80 | | 10154 |
| POL | VLFLDGIDK | 751 | 9 | 51 | 80 | 0.0380 | 10155 |
| POL | VIYQYMDDLY | 368 | 10 | 51 | 80 | 0.0007 | 10156 |
| POL | WGFTTPDKKH | 401 | 10 | 51 | 80 | | 10157 |
| POL | FTTPDKKHQK | 403 | 10 | 51 | 80 | 0.0002 | 10158 |
| POL | VLFLDGIDKA | 751 | 10 | 51 | 80 | 0.0004 | 10159 |
| POL | KSVTVLDVGD | 293 | 11 | 51 | 80 | | 10160 |
| POL | GFTTPDKKIIQ | 402 | 11 | 51 | 80 | | 10161 |
| POL | QATWIPEWEF | 599 | 10 | 52 | 83 | 0.0004 | 10162 |
| POL | PAGLKKKK | 286 | 8 | 52 | 81 | | 10163 |
| POL | SDLEIGQH | 380 | 8 | 52 | 81 | | 10164 |
| POL | DLEIGQHR | 381 | 8 | 52 | 81 | | 10165 |
| POL | WGFTTPDK | 401 | 8 | 52 | 81 | | 10166 |
| POL | GFTTPDKK | 402 | 8 | 52 | 81 | | 10167 |
| POL | KCQLKGEA | 794 | 8 | 52 | 81 | | 10168 |
| POL | VASGYIEA | 831 | 8 | 52 | 81 | | 10169 |
| POL | KIQNFRVY | 971 | 8 | 52 | 81 | | 10170 |
| POL | KVVPRRKA | 1011 | 8 | 52 | 81 | | 10171 |
| POL | VVPRRKAK | 1012 | 8 | 52 | 81 | 0.0027 | 10172 |
| POL | ETPGIRYQY | 327 | 9 | 52 | 81 | | 10173 |
| POL | GSDLEIGQH | 379 | 9 | 52 | 81 | | 10174 |
| POL | SDLEIGQHR | 380 | 9 | 52 | 81 | 0.0003 | 10175 |
| POL | WGFTTPDKK | 401 | 9 | 52 | 81 | 0.0004 | 10176 |
| POL | ATWIPEWEF | 600 | 9 | 52 | 81 | | 10177 |
| POL | IIVASGYIEA | 830 | 9 | 52 | 81 | 0.0003 | 10178 |
| POL | KIQNFRVYY | 971 | 9 | 52 | 81 | 0.1200 | 10179 |
| POL | KVVPRRKAK | 1011 | 9 | 52 | 81 | 0.0290 | 10180 |
| POL | VGSDLEIGQH | 378 | 10 | 52 | 81 | | 10181 |
| POL | GSDLEIGQIIR | 379 | 10 | 52 | 81 | | 10182 |
| POL | KIQNFRVYYR | 971 | 10 | 52 | 81 | 0.0320 | 10183 |
| POL | NFRVYYRDSR | 974 | 10 | 52 | 81 | | 10184 |
| POL | IGGIGGFIKVR | 134 | 11 | 52 | 81 | | 10185 |
| POL | VGPTPVNIIGR | 164 | 11 | 52 | 81 | | 10186 |
| POL | YVGSDLEIGQII | 377 | 11 | 52 | 81 | | 10187 |
| POL | VGSDLEIGQIIR | 378 | 11 | 52 | 81 | | 10188 |
| POL | AVIIVASGYIEA | 828 | 11 | 52 | 81 | | 10189 |
| POL | SGYIEAEVIPA | 833 | 11 | 52 | 81 | | 10190 |
| POL | GIPIIPAGLKKK | 282 | 11 | 53 | 84 | | 10191 |
| POL | IGGFIKVR | 137 | 8 | 53 | 83 | | 10192 |
| POL | GFIKVRQY | 139 | 8 | 53 | 83 | | 10193 |
| POL | PIETVPVK | 190 | 8 | 53 | 83 | | 10194 |
| POL | ETVPVKLK | 192 | 8 | 53 | 83 | 0.0049 | 10195 |
| POL | ELELAENR | 489 | 8 | 53 | 83 | | 10196 |
| POL | QLKGEAMII | 796 | 8 | 53 | 83 | | 10197 |
| POL | ESMNKELK | 904 | 8 | 53 | 83 | | 10198 |
| POL | SMNKELKK | 905 | 8 | 53 | 83 | | 10199 |
| POL | GIGGFIKVR | 136 | 9 | 53 | 83 | 0.0008 | 10200 |
| POL | GGFIKVRQY | 138 | 9 | 53 | 83 | 0.0004 | 10201 |
| POL | YIEAEVIPA | 835 | 9 | 53 | 83 | 0.0003 | 10202 |
| POL | ESMNKELKK | 904 | 9 | 53 | 83 | | 10203 |
| POL | GGIGGFIKVR | 135 | 10 | 53 | 83 | 0.0004 | 10204 |
| POL | IGGFIKVRQY | 137 | 10 | 53 | 83 | 0.0004 | 10205 |
| POL | ISPIETVPVK | 188 | 10 | 53 | 83 | 0.0003 | 10206 |
| POL | PIETVPVKLK | 190 | 10 | 53 | 83 | 0.0002 | 10207 |
| POL | EAELELAENR | 487 | 10 | 53 | 83 | | 10208 |
| POL | LYAVIIVASGY | 826 | 10 | 53 | 83 | | 10209 |
| POL | GIGGFIKVRQY | 136 | 11 | 53 | 83 | | 10210 |
| POL | PISPIETVPVK | 187 | 11 | 53 | 83 | | 10211 |
| POL | ILVAVHVASGY | 825 | 11 | 53 | 83 | | 10212 |
| POL | FVNTPPLVK | 608 | 9 | 54 | 86 | 0.0120 | 10213 |
| POL | GIPIIPAGLKK | 282 | 10 | 54 | 86 | 0.0110 | 10214 |
| POL | LGIPHPAGLKK | 281 | 11 | 54 | 86 | | 10215 |
| POL | ILVAVIIVA | 825 | 8 | 54 | 84 | | 10216 |
| POL | PTPVNIIGR | 166 | 9 | 54 | 84 | 0.0008 | 10217 |
| POL | PLTEEKIKA | 212 | 9 | 54 | 84 | | 10218 |
| POL | LAENREILK | 492 | 9 | 54 | 84 | 0.0002 | 10219 |
| POL | EVQLGIPIIPA | 278 | 10 | 54 | 84 | | 10220 |
| POL | ELAENREILK | 491 | 10 | 54 | 84 | 0.0002 | 10221 |
| POL | IEFVNTPPLVK | 607 | 10 | 54 | 84 | | 10222 |
| POL | PLTEEKIK | 212 | 8 | 55 | 86 | | 10223 |
| POL | ETFYVDGA | 630 | 8 | 55 | 86 | | 10224 |
| POL | LFLDGIDK | 752 | 8 | 55 | 86 | | 10225 |
| POL | FLDGIDKA | 753 | 8 | 55 | 86 | | 10226 |
| POL | LFLDGIDKA | 752 | 9 | 55 | 86 | | 10227 |
| POL | QLGIPIIPA | 280 | 8 | 56 | 89 | | 10228 |
| POL | GIPHPAGLK | 282 | 9 | 56 | 89 | 0.2300 | 10229 |
| POL | KGGIGGYSA | 940 | 9 | 56 | 89 | | 10230 |
| POL | LGIPHPAGLK | 281 | 10 | 56 | 89 | 0.0370 | 10231 |
| POL | QLGIPHPAGLK | 280 | 11 | 56 | 89 | | 10232 |
| POL | LTEEKIKA | 213 | 8 | 56 | 88 | | 10233 |
| POL | VTVLDVGDAY | 295 | 10 | 56 | 88 | 0.0001 | 10234 |
| POL | ELKKIIGQVR | 909 | 10 | 56 | 88 | | 10235 |
| POL | DFWEVQLGIPII | 275 | 11 | 56 | 88 | | 10236 |
| POL | SVTVLDVGDA | 294 | 11 | 56 | 88 | | 10237 |
| POL | VTVLDVGDAY | 295 | 11 | 56 | 88 | | 10238 |
| POL | PAETGQETAY | 842 | 11 | 56 | 88 | | 10239 |
| POL | KTAVQMAVFI | 925 | 11 | 56 | 88 | | 10240 |
| POL | TGQETAYF | 845 | 8 | 57 | 89 | | 10241 |
| POL | AIKKKDSTK | 251 | 9 | 57 | 89 | 0.0017 | 10242 |
| POL | ELNKRTQDF | 268 | 9 | 57 | 89 | | 10243 |
| POL | VTVLDVGDA | 295 | 9 | 57 | 89 | | 10244 |
| POL | TVLDVGDAY | 296 | 9 | 57 | 89 | 0.0002 | 10245 |
| POL | TTPDKKIIQK | 404 | 9 | 57 | 89 | 0.0002 | 10246 |
| POL | ETGQETAYF | 844 | 9 | 57 | 89 | | 10247 |
| POL | IILKTAVQMA | 923 | 9 | 57 | 89 | 0.0003 | 10248 |
| POL | KTAVQMAVF | 925 | 9 | 57 | 89 | 0.0003 | 10249 |
| POL | FAIKKKDSTK | 250 | 10 | 57 | 89 | 0.0004 | 10250 |
| POL | SVTVLDVGDA | 294 | 10 | 57 | 89 | | 10251 |
| POL | TVLDVGDAYF | 296 | 10 | 57 | 89 | 0.0004 | 10252 |
| POL | NTPPLVKLWY | 610 | 10 | 57 | 89 | 0.0002 | 10253 |
| POL | AIKKKDSTKW | 251 | 11 | 57 | 89 | | 10254 |
| POL | IILKTAVQMAV | 923 | 11 | 57 | 89 | | 10255 |
| POL | MAVFIIINFKR | 930 | 11 | 57 | 89 | | 10256 |
| POL | GGIGGYSAGER | 941 | 11 | 57 | 89 | | 10257 |
| POL | NLKTGKYA | 540 | 8 | 58 | 92 | | 10258 |
| POL | VLPQGWKGSP | 337 | 11 | 58 | 92 | | 10259 |
| POL | KDSTKWRK | 255 | 8 | 58 | 91 | | 10260 |
| POL | EVQLGIPII | 278 | 8 | 58 | 91 | | 10261 |
| POL | TVLDVGDA | 296 | 8 | 58 | 91 | | 10262 |
| POL | YALGIIQA | 693 | 8 | 58 | 91 | | 10263 |
| POL | GGNEQVDK | 735 | 8 | 58 | 91 | | 10264 |
| POL | FIHNFKRK | 933 | 8 | 58 | 91 | | 10265 |
| POL | GGYSAGER | 944 | 8 | 58 | 91 | | 10266 |
| POL | RVYYRDSR | 976 | 8 | 58 | 91 | | 10267 |
| POL | IGGNEQVDK | 734 | 9 | 58 | 91 | 0.0004 | 10268 |
| POL | PAETGQETA | 842 | 9 | 58 | 91 | | 10269 |
| POL | VFIHNFKRK | 932 | 9 | 58 | 91 | 0.0004 | 10270 |
| POL | IGGYSAGER | 943 | 9 | 58 | 91 | 0.0004 | 10271 |
| POL | STKWRKLVDF | 257 | 10 | 58 | 91 | 0.0003 | 111272 |
| POL | GIGGNEQVDK | 733 | 10 | 58 | 91 | 0.0005 | 10273 |
| POL | PAETGQETAY | 842 | 10 | 58 | 91 | | 10274 |
| POL | AVFIHNFKRK | 931 | 10 | 58 | 91 | 0.6600 | 10275 |
| POL | GIGGYSAGER | 942 | 10 | 58 | 91 | 0.0003 | 10276 |
| POL | DSTKWRKLVD | 256 | 11 | 58 | 91 | | 10277 |
| POL | STKWRKLVDF | 257 | 11 | 58 | 91 | | 10278 |
| POL | DSQYALGIIQA | 690 | 11 | 58 | 91 | | 10279 |
| POL | KGIGGNEQVDK | 732 | 11 | 58 | 91 | | 10280 |
| POL | VIPAETGQETA | 840 | 11 | 58 | 91 | | 10281 |
| POL | QGWKGSPA | 340 | 8 | 59 | 92 | | 10282 |
| POL | AVIIVASGY | 828 | 8 | 59 | 92 | | 10283 |
| POL | ETGQETAY | 844 | 8 | 59 | 92 | | 10284 |
| POL | QAFIILKTA | 920 | 8 | 59 | 92 | | 10285 |
| POL | GGIGGYSA | 941 | 8 | 59 | 92 | | 10286 |
| POL | GIWQLDCTII | 811 | 9 | 59 | 92 | | 10287 |
| POL | VAVIIVASGY | 827 | 9 | 59 | 92 | 0.0004 | 10288 |
| POL | KGPAKLLWK | 988 | 9 | 59 | 92 | 0.0021 | 10289 |
| POL | QGWKGSPAIF | 340 | 10 | 59 | 92 | 0.0004 | 10290 |
| POL | EVNIVTDSQY | 684 | 10 | 59 | 92 | | 10291 |
| POL | PGIWQLDCTII | 810 | 10 | 59 | 92 | | 10292 |
| POL | TAVQMAVFIII | 926 | 10 | 59 | 92 | 0.0004 | 10293 |
| POL | VGKLNWASQI | 450 | 11 | 59 | 92 | | 10294 |
| POL | EVNIVTDSQYA | 684 | 11 | 59 | 92 | | 10295 |
| POL | NFKRKGGIGGY | 936 | 11 | 59 | 92 | | 10296 |
| POL | PAKLLWKGEG | 990 | 11 | 59 | 92 | | 10297 |
| POL | QLDCTIILEGK | 814 | 10 | 60 | 95 | 0.0010 | 10298 |
| POL | DFRELNKR | 265 | 8 | 60 | 94 | | 10299 |
| POL | VLDVGDAY | 297 | 8 | 60 | 94 | | 10300 |
| POL | MAVFIIINF | 930 | 8 | 60 | 94 | | 10301 |
| POL | VDFRELNKR | 264 | 9 | 60 | 94 | | 10302 |
| POL | VLDVGDAYF | 297 | 9 | 60 | 94 | | 10303 |
| POL | MGYELIIPDK | 419 | 9 | 60 | 94 | 0.0640 | 10304 |
| POL | KLNWASQIY | 452 | 9 | 60 | 94 | 0.1200 | 10305 |
| POL | AVQMAVFIII | 927 | 9 | 60 | 94 | | 10306 |
| POL | QMAVFIHNF | 929 | 9 | 60 | 94 | 0.0010 | 10307 |
| POL | MAVFIHNFK | 930 | 9 | 60 | 94 | 0.0170 | 10308 |
| POL | KLLWKGEGA | 992 | 9 | 60 | 94 | 0.0003 | 10309 |
| POL | LVDFRELNKR | 263 | 10 | 60 | 94 | | 10310 |
| POL | WMGYELHPDK | 418 | 10 | 60 | 94 | 0.0005 | 10311 |
| POL | QMAVFIIINFK | 929 | 10 | 60 | 94 | 0.6100 | 10312 |
| POL | MAVFIIINFKR | 930 | 10 | 60 | 94 | 0.0068 | 10313 |
| POL | KLVDFRELNK | 262 | 11 | 60 | 94 | | 10314 |
| POL | PDKKHQKEPPF | 406 | 11 | 60 | 94 | | 10315 |
| POL | AVQMAVFIHN | 927 | 11 | 60 | 94 | | 10316 |
| POL | QMAVFIHNFK | 929 | 11 | 60 | 94 | | 10317 |
| POL | EALLDTGA | 108 | 8 | 61 | 95 | | 10318 |
| POL | LDVGDAYF | 298 | 8 | 61 | 95 | | 10319 |
| POL | LVGKLNWA | 449 | 8 | 61 | 95 | | 10320 |
| POL | IVTDSQYA | 687 | 8 | 61 | 95 | | 10321 |
| POL | TAVQMAVF | 926 | 8 | 61 | 95 | | 10322 |
| POL | NDIQKLVGK | 444 | 9 | 61 | 95 | | 10323 |
| POL | KLVGKLNWA | 448 | 9 | 61 | 95 | 0.0003 | 10324 |
| POL | NIVTDSQYA | 686 | 9 | 61 | 95 | | 10325 |
| POL | LDCTIILEGK | 815 | 9 | 61 | 95 | | 10326 |
| POL | TVNDIQKLVGK | 442 | 11 | 61 | 95 | 0.0400 | 10327 |
| POL | MIGGIGGF | 133 | 8 | 62 | 97 | | 10328 |
| POL | VDFRELNK | 264 | 8 | 62 | 97 | | 10329 |
| POL | WTVNDIQK | 441 | 8 | 62 | 97 | 0.0003 | 10330 |
| POL | DIQKLVGK | 445 | 8 | 62 | 97 | | 10331 |
| POL | NIVTDSQY | 686 | 8 | 62 | 97 | | 10332 |
| POL | DCIIILEGK | 816 | 8 | 62 | 97 | | 10333 |
| POL | AVFIIINFK | 931 | 8 | 62 | 97 | 0.0280 | 10334 |
| POL | VFIHNFKR | 932 | 8 | 62 | 97 | | 10335 |
| POL | LLWKGEGA | 993 | 8 | 62 | 97 | | 10336 |
| POL | KMIGGIGGF | 132 | 9 | 62 | 97 | 0.0004 | 10337 |
| POL | LVDFRELNK | 263 | 9 | 62 | 97 | 0.0110 | 10338 |
| POL | AVFIIINFKR | 931 | 9 | 62 | 97 | 0.1700 | 10339 |
| POL | MIGGIGGFIK | 133 | 10 | 62 | 97 | 0.0099 | 10340 |
| POL | KLVDFRELNK | 262 | 10 | 62 | 97 | 0.5100 | 10341 |
| POL | KMIGGIGGFIK | 132 | 11 | 62 | 97 | 2.3000 | 10342 |
| POL | NVLPQGWK | 336 | 8 | 63 | 100 | 0.0003 | 10343 |
| POL | IGGIGGFIK | 134 | 9 | 63 | 98 | 0.0004 | 10344 |
| POL | GGIGGFIK | 135 | 8 | 64 | 100 | | 10345 |
| POL | FLWMGYELII | 416 | 9 | 64 | 100 | | 10346 |
| POL | PFLWMGYELII | 415 | 10 | 64 | 100 | | 10347 |
| REV | GTRQTRKNR | 37 | 9 | 01 | 50 | | 10348 |
| REV | TTRQARRNR | 37 | 9 | 01 | 50 | | 10349 |
| REV | GTRQTRKNRR | 37 | 10 | 01 | 50 | | 10350 |
| REV | TTRQARRNRR | 37 | 10 | 01 | 50 | | 10351 |
| REV | GTRQTRKNRR | 37 | 11 | 01 | 50 | | 10352 |
| REV | TTRQARRNRR | 37 | 11 | 01 | 50 | | 10353 |
| REV | GTETGVGR | 103 | 8 | 06 | 19 | | 10354 |
| REV | QGTETGVGR | 102 | 9 | 06 | 19 | | 10355 |
| REV | LLKTVRLIK | 12 | 9 | 10 | 16 | | 10356 |
| REV | GDSDEELLK | 6 | 9 | 11 | 17 | | 10357 |
| REV | PLQLPPIER | 76 | 9 | 11 | 17 | | 10358 |
| REV | SGDSDEELLK | 5 | 10 | 11 | 17 | | 10359 |
| REV | RSGDSDEELLK | 4 | 11 | 11 | 17 | | 10360 |
| REV | PVPLQLPPIER | 74 | 11 | 11 | 17 | | 10361 |
| REV | RARQRQIR | 50 | 8 | 12 | 19 | | 10362 |
| REV | DSDEELLK | 7 | 8 | 12 | 19 | | 10363 |
| REV | ILSTCLGR | 63 | 8 | 12 | 19 | | 10364 |
| REV | RILSTCLGR | 62 | 9 | 12 | 19 | | 10365 |
| REV | AVRIIKILY | 17 | 9 | 13 | 20 | | 10366 |
| REV | PSPEGTRQA | 31 | 9 | 13 | 20 | | 10367 |
| REV | QLPPLERLH | 78 | 9 | 13 | 20 | | 10368 |
| REV | PSPEGTRQAR | 31 | 10 | 13 | 20 | | 10369 |
| REV | PSPEGTRQAR | 31 | 11 | 13 | 20 | | 10370 |
| REV | PLQLPPLERLH | 76 | 11 | 13 | 20 | | 10371 |
| REV | GTRQARKNRR | 36 | 11 | 14 | 22 | | 10372 |
| REV | RARQRQIII | 50 | 8 | 15 | 24 | | 10373 |
| REV | GTRQARKNR | 36 | 9 | 15 | 23 | | 10374 |
| REV | GTRQARKNRR | 36 | 10 | 15 | 23 | | 10375 |
| REV | QARKNRRRR | 40 | 9 | 16 | 25 | | 10376 |
| REV | QARKNRRRR | 40 | 11 | 16 | 25 | | 10377 |
| REV | QARKNRRR | 40 | 8 | 17 | 27 | | 10378 |
| REV | IIKILYQSNPY | 20 | 11 | 18 | 28 | | 10379 |
| REV | KILYQSNPY | 22 | 9 | 26 | 41 | | 10380 |
| REV | ILYQSNPY | 23 | 8 | 27 | 42 | | 10381 |
| REV | EGTRQARR | 35 | 8 | 27 | 42 | | 10382 |
| REV | EGTRQARRNR | 35 | 10 | 27 | 42 | | 10383 |
| REV | EGTRQARRNR | 35 | 11 | 27 | 42 | | 10384 |
| REV | GTRQARRNR | 36 | 9 | 34 | 53 | | 10385 |
| REV | GTRQARRNRR | 36 | 10 | 34 | 53 | | 10386 |
| REV | GTRQARRNRR | 36 | 11 | 34 | 53 | | 10387 |
| REV | PVPLQLPPLER | 74 | 11 | 34 | 53 | | 10388 |
| REV | PLQLPPLER | 76 | 9 | 35 | 55 | | 10389 |
| REV | QARRNRRRR | 40 | 11 | 37 | 58 | | 10390 |
| REV | QARRNRRR | 40 | 8 | 38 | 59 | | 10391 |
| REV | QARRNRRRR | 40 | 9 | 38 | 59 | | 10392 |
| TAT | PGGYPRRK | 104 | 8 | 01 | 50 | | 10393 |
| TAT | AGPGGYPRR | 102 | 9 | 01 | 50 | | 10394 |
| TAT | TGPSGQPCH | 102 | 9 | 01 | 50 | | 10395 |
| TAT | ETGPSGQPCII | 101 | 10 | 01 | 50 | | 10396 |
| TAT | KAGPGGYPRR | 101 | 10 | 01 | 50 | | 10397 |
| TAT | AGPGGYPRRK | 102 | 10 | 01 | 50 | | 10398 |
| TAT | KAGPGGYPRR | 101 | 11 | 01 | 50 | | 10399 |
| TAT | GGYPRRKGSC | 105 | 11 | 01 | 50 | | 10400 |
| TAT | PGSQPRTA | 17 | 8 | 10 | 16 | | 10401 |
| TAT | ACTNCYCK | 24 | 8 | 10 | 16 | | 10402 |
| TAT | TACTNCYCK | 23 | 9 | 10 | 16 | | 10403 |
| TAT | YCKKCCFII | 29 | 8 | 11 | 17 | | 10404 |
| TAT | YCKKCCYII | 29 | 8 | 11 | 17 | | 10405 |
| TAT | CFIICQVCF | 34 | 8 | 11 | 17 | | 10406 |
| TAT | VDPRLEPWK | 4 | 9 | 11 | 17 | | 10407 |
| TAT | ACNNCYCKK | 24 | 9 | 11 | 17 | | 10408 |
| TAT | CCFHCQVCF | 33 | 9 | 11 | 17 | | 10409 |
| TAT | PVDPRLEPWK | 3 | 10 | 11 | 17 | 0.0005 | 10410 |
| TAT | VDPRLEPWKH | 4 | 10 | 11 | 17 | | 10411 |
| TAT | TACNNCYCKK | 23 | 10 | 11 | 17 | | 10412 |
| TAT | PVDPRLEPWK | 3 | 11 | 11 | 17 | | 10413 |
| TAT | RGDPTGPKES | 84 | 11 | 11 | 17 | | 10414 |
| TAT | GDPTGPKESK | 85 | 11 | 11 | 17 | | 10415 |
| TAT | ESKKKVESK | 93 | 9 | 12 | 19 | | 10416 |
| TAT | GDPTGPKESK | 85 | 10 | 12 | 19 | | 10417 |
| TAT | PTGPKESKKK | 88 | 10 | 12 | 19 | | 10418 |
| TAT | TGPKESKKK | 89 | 9 | 13 | 20 | | 10419 |
| TAT | FLNKGLGISY | 41 | 10 | 14 | 22 | | 10420 |
| TAT | PVDPNLEPWN | 3 | 11 | 14 | 22 | | 10421 |
| TAT | CFLNKGLGISY | 40 | 11 | 14 | 22 | | 10422 |
| TAT | RGDPTGPK | 84 | 8 | 16 | 25 | | 10423 |
| TAT | VDPNLEPWNH | 4 | 10 | 16 | 25 | | 10424 |
| TAT | ACNNCYCK | 24 | 8 | 17 | 27 | | 10425 |
| TAT | TACNNCYCK | 23 | 9 | 17 | 27 | | 10426 |
| TAT | PTGPKESKK | 88 | 9 | 18 | 28 | | 10427 |
| TAT | TGPKESKK | 89 | 8 | 19 | 30 | | 10428 |
| TAT | PTGPKESK | 88 | 8 | 20 | 31 | | 10429 |
| TAT | YGRKKRRQRR | 50 | 11 | 22 | 34 | | 10430 |
| TAT | PGSQPKTA | 17 | 8 | 26 | 41 | | 10431 |
| TAT | YGRKKRRQRR | 50 | 10 | 38 | 59 | | 10432 |
| TAT | ISYGRKKRRQR | 48 | 11 | 39 | 61 | | 10433 |
| TAT | YGRKKRRQR | 50 | 9 | 41 | 64 | | 10434 |
| TAT | GISYGRKKRR | 47 | 10 | 45 | 70 | 0.0003 | 10435 |
| TAT | LGISYGRKKRR | 46 | 11 | 45 | 70 | | 10436 |
| TAT | ISYGRKKRR | 48 | 9 | 46 | 72 | 0.0008 | 10437 |
| TAT | GLGISYGRKKR | 45 | 11 | 54 | 86 | | 10438 |
| TAT | GLGISYGR | 45 | 8 | 55 | 87 | | 10439 |
| TAT | GLGISYGRK | 45 | 9 | 55 | 87 | 0.0340 | 10440 |
| TAT | GLGISYGRKK | 45 | 10 | 55 | 87 | | 10441 |
| TAT | KGLGISYGR | 44 | 9 | 55 | 86 | 0.0006 | 10442 |
| TAT | KGLGISYGRK | 44 | 10 | 55 | 86 | 0.0100 | 10443 |
| TAT | KGLGISYGRKK | 44 | 11 | 55 | 86 | | 10444 |
| TAT | GISYGRKKR | 47 | 9 | 57 | 89 | 0.0008 | 10445 |
| TAT | LGISYGRKKR | 46 | 10 | 57 | 89 | | 10446 |
| TAT | LGISYGRK | 46 | 8 | 58 | 91 | | 10447 |
| TAT | GISYGRKK | 47 | 8 | 58 | 91 | | 10448 |
| TAT | ISYGRKKR | 48 | 8 | 58 | 91 | | 10449 |
| TAT | LGISYGRKK | 46 | 9 | 58 | 91 | 0.0004 | 10450 |
| VIF | LIVWQVDR | 8 | 8 | 10 | 16 | | 10451 |
| VIF | RMRINTWK | 15 | 8 | 10 | 16 | | 10452 |
| VIF | LIKPKKIK | 158 | 8 | 10 | 16 | | 10453 |
| VIF | KGWFYRIIIIY | 36 | 9 | 10 | 16 | | 10154 |
| VIF | ALIKPKKIK | 157 | 9 | 10 | 16 | | 10455 |
| VIF | VDRMRINTWK | 13 | 10 | 10 | 16 | | 10456 |
| VIF | GVSIEWRLRR | 87 | 10 | 10 | 16 | | 10457 |
| VIF | QVDRMRINTW | 12 | 11 | 10 | 16 | | 10458 |
| VIF | RLVITTYWGL | 65 | 11 | 10 | 16 | | 10459 |
| VIF | QTGERDWHLG | 75 | 11 | 10 | 16 | | 10460 |
| VIF | GVSIEWRLRR | 87 | 11 | 10 | 16 | | 10461 |
| VIF | IDPDLADQLIII | 103 | 11 | 10 | 16 | | 10462 |
| VIF | LVEDRWNKPQ | 178 | 11 | 10 | 16 | | 10463 |
| VIF | YSTQIDPDLA | 99 | 10 | 11 | 17 | | 10464 |
| VIF | YSTQVDPGLA | 99 | 10 | 11 | 17 | | 10465 |
| VIF | SIEWKLRR | 89 | 8 | 11 | 17 | | 10466 |
| VIF | TALIKPKK | 156 | 8 | 11 | 17 | | 10467 |
| VIF | LVEDRWNK | 178 | 8 | 11 | 17 | | 10468 |
| VIF | VSIEWRLRR | 88 | 9 | 11 | 17 | | 10469 |
| VIF | SIEWRLRRY | 89 | 9 | 11 | 17 | | 10470 |
| VIF | STQVDPGLA | 100 | 9 | 11 | 17 | | 10471 |
| VIF | SLQYLALKA | 149 | 9 | 11 | 17 | | 10472 |
| VIF | LTALIKPKK | 155 | 9 | 11 | 17 | | 10473 |
| VIF | KLVEDRWNK | 177 | 9 | 11 | 17 | | 10474 |
| VIF | VSIEWRLRRY | 88 | 10 | 11 | 17 | | 10475 |
| VIF | GLADQLIHMH | 106 | 10 | 11 | 17 | | 10476 |
| VIF | IVSPRCEYQA | 133 | 10 | 11 | 17 | | 10477 |
| VIF | GSLQYLALKA | 148 | 10 | 11 | 17 | | 10478 |
| VIF | ALTALIKPKK | 154 | 10 | 11 | 17 | | 10479 |
| VIF | PGLADQLIHMH | 105 | 11 | 11 | 17 | | 10480 |
| VIF | GLADQLIHMH | 106 | 11 | 11 | 17 | | 10481 |
| VIF | VGSLQYLALK | 147 | 11 | 11 | 17 | | 10482 |
| VIF | LALTALIKPKK | 153 | 11 | 11 | 17 | | 10483 |
| VIF | WPYRIIHYESR | 38 | 11 | 12 | 19 | | 10484 |
| VIF | KGWFYRIIII | 36 | 8 | 12 | 19 | | 10485 |
| VIF | WGLQTGER | 72 | 8 | 12 | 19 | | 10486 |
| VIF | QTGERDWH | 75 | 8 | 12 | 19 | | 10487 |
| VIF | SDSAIRKA | 121 | 8 | 12 | 19 | | 10488 |
| VIF | SLQYLALA | 149 | 8 | 12 | 19 | | 10489 |
| VIF | IVWQVDRMK | 9 | 9 | 12 | 19 | | 10490 |
| VIF | STQIDPDLA | 100 | 9 | 12 | 19 | | 10491 |
| VIF | FSDSAIRKA | 120 | 9 | 12 | 19 | | 10492 |
| VIF | FSESAIRNA | 120 | 9 | 12 | 19 | | 10493 |
| VIF | GSLQYLALA | 148 | 9 | 12 | 19 | | 10494 |
| VIF | SLQYLALAA | 149 | 9 | 12 | 19 | | 10495 |
| VIF | KIRTWNSLVK | 17 | 10 | 12 | 19 | | 10496 |
| VIF | LVKIIIIMYVSK | 24 | 10 | 12 | 19 | | 10497 |
| VIF | GLQTGERDWII | 73 | 10 | 12 | 19 | | 10498 |
| VIF | TGERDWIILGII | 77 | 10 | 12 | 19 | | 10499 |
| VIF | IIGVSIEWRLR | 86 | 10 | 12 | 19 | | 10500 |
| VIF | CFSDSAIRKA | 119 | 10 | 12 | 19 | | 10501 |
| VIF | CFSLSAIRNA | 119 | 10 | 12 | 19 | | 10502 |
| VIF | VGSLQYLALA | 147 | 10 | 12 | 19 | | 10503 |
| VIF | GSLQYLALAA | 148 | 10 | 12 | 19 | | 10504 |
| VIF | IVWQVDRMKI | 9 | 11 | 12 | 19 | | 10505 |
| VIF | KIRTWNSLVK | 17 | 11 | 12 | 19 | | 10506 |
| VIF | SLVKIIIIMYVS | 23 | 11 | 12 | 19 | | 10507 |
| VIF | LVKHIIMYVSK | 24 | 11 | 12 | 19 | | 10508 |
| VIF | WGLQTGERD | 72 | 11 | 12 | 19 | | 10509 |
| VIF | DCFSESAIRKA | 118 | 11 | 12 | 19 | | 10510 |
| VIF | DCFSESAIRNA | 118 | 11 | 12 | 19 | | 10511 |
| VIF | KVGSLQYLAL | 146 | 11 | 12 | 19 | | 10512 |
| VIF | VGSLQYLALA | 147 | 11 | 12 | 19 | | 10513 |
| VIF | WFYRIIHYESR | 38 | 10 | 13 | 21 | | 10514 |
| VIF | QVDRMKIR | 12 | 8 | 13 | 20 | | 10515 |
| VIF | IIMYVSKKA | 28 | 8 | 13 | 20 | | 10516 |
| VIF | HIPLGDAR | 56 | 8 | 13 | 20 | | 10517 |
| VIF | ADQLIHMH | 108 | 8 | 13 | 20 | | 10518 |
| VIF | CPSDSAIR | 119 | 8 | 13 | 20 | | 10519 |
| VIF | PSDSAIRK | 120 | 8 | 13 | 20 | | 10520 |
| VIF | SLQYLALK | 149 | 8 | 13 | 20 | | 10521 |
| VIF | LTALIKPK | 155 | 8 | 13 | 20 | | 10522 |
| VIF | LADQLIHMH | 107 | 9 | 13 | 20 | | 10523 |
| VIF | ADQLIHMHY | 108 | 9 | 13 | 20 | | 10524 |
| VIF | CFSDSAIRK | 119 | 9 | 13 | 20 | | 10525 |
| VIF | PSESAIRKA | 120 | 9 | 13 | 20 | | 10526 |
| VIF | GSLQYLALK | 148 | 9 | 13 | 20 | | 10527 |
| VIF | ALTALIKPK | 154 | 9 | 13 | 20 | | 10528 |
| VIF | SVKKLTEDR | 174 | 9 | 13 | 20 | | 10529 |
| VIF | EVHIPLGDAR | 54 | 10 | 13 | 20 | | 10530 |
| VIF | LADQLIHMHY | 107 | 10 | 13 | 20 | | 10531 |
| VIF | ADQLIIIMIIYF | 108 | 10 | 13 | 20 | | 10532 |
| VIF | DCPSESAIRK | 118 | 10 | 13 | 20 | | 10533 |
| VIF | CPSESAIRKA | 119 | 10 | 13 | 20 | | 10534 |
| VIF | VGSLQYLALK | 147 | 10 | 13 | 20 | | 10535 |
| VIF | LALTALIKPK | 153 | 10 | 13 | 20 | | 10536 |
| VIF | PSVKKLTEDR | 173 | 10 | 13 | 20 | | 10537 |
| VIF | LADQLIIIMHYF | 107 | 11 | 13 | 20 | | 10538 |
| VIF | QLIIILYYPDCF | 110 | 11 | 13 | 20 | | 10539 |
| VIF | FDCFSESAIRK | 117 | 11 | 13 | 20 | | 10540 |
| VIF | YLALTALIKPK | 152 | 11 | 13 | 20 | | 10541 |
| VIF | QLIIILYYF | 110 | 8 | 14 | 22 | | 10542 |
| VIF | QLIIIMIIYF | 110 | 8 | 14 | 22 | | 10543 |
| VIF | FSESAIRK | 120 | 8 | 14 | 22 | | 10544 |
| VIF | IVSPRCEY | 133 | 8 | 14 | 22 | | 10545 |
| VIF | GVSIEWRLR | 87 | 9 | 14 | 22 | | 10546 |
| VIF | ADQLIIILYY | 108 | 9 | 14 | 22 | | 10547 |
| VIF | CFSESAIRK | 119 | 9 | 14 | 22 | | 10548 |
| VIF | VDRMRIRTWK | 13 | 10 | 14 | 22 | | 10549 |
| VIF | LADQLIHLYY | 107 | 10 | 14 | 22 | | 10550 |
| VIF | ADQLIIILYYF | 108 | 10 | 14 | 22 | | 10551 |
| VIF | RCDYQAGIINK | 137 | 10 | 14 | 22 | | 10552 |
| VIF | QVDRMRIRTW | 12 | 11 | 14 | 22 | | 10553 |
| VIF | RIRTWNSLVK | 17 | 11 | 14 | 22 | | 10554 |
| VIF | LADQLIHLYYF | 107 | 11 | 14 | 22 | | 10555 |
| VIF | QLIIIMIIYFDCF | 110 | 11 | 14 | 22 | | 10556 |
| VIF | RMRIRTWK | 15 | 8 | 15 | 23 | | 10557 |
| VIF | RTWKSLVK | 19 | 8 | 15 | 23 | | 10558 |
| VIF | VSIEWRLR | 88 | 8 | 15 | 23 | | 10559 |
| VIF | ADQLIIILY | 108 | 8 | 15 | 23 | | 10560 |
| VIF | IIMIIYFDCF | 113 | 8 | 15 | 23 | | 10561 |
| VIF | RTWKSLVKII | 19 | 9 | 15 | 23 | | 10562 |
| VIF | QGVSIEWRK | 86 | 9 | 15 | 23 | | 10563 |
| VIF | LADQLIHLY | 107 | 9 | 15 | 23 | | 10564 |
| VIF | AIRKAILGH | 124 | 9 | 15 | 23 | | 10565 |
| VIF | CDYQAGHNK | 138 | 9 | 15 | 23 | | 10566 |
| VIF | RIRTWKSLVK | 17 | 10 | 15 | 23 | | 10567 |
| VIF | RIRTWNSLVK | 17 | 10 | 15 | 23 | | 10568 |
| VIF | RTWKSLVKHH | 19 | 10 | 15 | 23 | | 10569 |
| VIF | LIIIMIIYFDCF | 111 | 10 | 15 | 23 | | 10570 |
| VIF | SAIRKAILGII | 123 | 10 | 15 | 23 | | 10571 |
| VIF | RIRTWKSLVK | 17 | 11 | 15 | 23 | | 10572 |
| VIF | LGQGVSIEWR | 84 | 11 | 15 | 23 | | 10573 |
| VIF | VDPGLADQLIII | 103 | 11 | 15 | 23 | | 10574 |
| VIF | ITTYWGLH | 68 | 8 | 16 | 25 | | 10575 |
| VIF | GVSIEWRK | 87 | 8 | 16 | 25 | | 10576 |
| VIF | IILYYFDCF | 113 | 8 | 16 | 25 | | 10577 |
| VIF | RCDYQAGH | 137 | 8 | 16 | 25 | | 10578 |
| VIF | LALTALIK | 153 | 8 | 16 | 25 | | 10579 |
| VIF | VITTYWGLH | 67 | 9 | 16 | 25 | | 10580 |
| VIF | YLALTALIK | 152 | 9 | 16 | 25 | | 10581 |
| VIF | KTKGHRGSH | 188 | 9 | 16 | 25 | 0.0004 | 10582 |
| VIF | LVITTYWGLH | 66 | 10 | 16 | 25 | | 10583 |
| VIF | LIIILYYFDCF | 111 | 10 | 16 | 25 | | 10584 |
| VIF | EDRWNKPQKT | 180 | 11 | 17 | 27 | | 10585 |
| VIF | KSLVKHHMY | 22 | 9 | 18 | 28 | | 10586 |
| VIF | EDRWNKPQKT | 180 | 11 | 18 | 28 | | 10587 |
| VIF | RCEYQAGIINK | 137 | 10 | 19 | 30 | | 10588 |
| VIF | IIIPLGEAR | 56 | 8 | 20 | 31 | | 10589 |
| VIF | EVIIIPLGEAR | 54 | 10 | 20 | 31 | | 10590 |
| VIF | IITGERDWH | 75 | 8 | 21 | 33 | | 10591 |
| VIF | DLADQLIII | 106 | 8 | 21 | 33 | | 10592 |
| VIF | PDLADQLIII | 105 | 9 | 21 | 33 | | 10593 |
| VIF | VSPRCEYQA | 134 | 9 | 21 | 33 | | 10594 |
| VIF | GLHTGERDWH | 73 | 10 | 21 | 33 | | 10595 |
| VIF | WGLIITGERD | 72 | 11 | 21 | 33 | | 10596 |
| VIF | VSPRCEYQAG | 134 | 11 | 21 | 33 | | 10597 |
| VIF | LTEDRWNKPQ | 178 | 11 | 21 | 33 | 0.0390 | 10598 |
| VIF | GSIITMNGH | 194 | 8 | 22 | 34 | | 10599 |
| VIF | RGSHTMNGH | 193 | 9 | 22 | 34 | | 10600 |
| VIF | TTYWGLHTGE | 69 | 11 | 22 | 34 | | 10601 |
| VIF | HLGIIGVSIEW | 83 | 11 | 22 | 34 | | 10602 |
| VIF | SSEVIIIPLGDA | 52 | 11 | 23 | 36 | | 10603 |
| VIF | NSLVKIIIIMY | 22 | 9 | 24 | 38 | | 10604 |
| VIF | EVIIIPLGDA | 54 | 9 | 24 | 38 | | 10605 |
| VIF | QGVSIEWR | 86 | 8 | 25 | 39 | | 10606 |
| VIF | EVHIPLGIEA | 54 | 9 | 25 | 39 | | 10607 |
| VIF | LGQGVSIEWR | 84 | 10 | 25 | 39 | | 10608 |
| VIF | SSEVHIPLGEA | 52 | 11 | 25 | 39 | | 10609 |
| VIF | IILGQGVSIEW | 83 | 11 | 25 | 39 | | 10610 |
| VIF | RCEYQAGII | 137 | 8 | 26 | 41 | | 10611 |
| VIF | RTWNSLVKH | 19 | 9 | 26 | 41 | | 10612 |
| VIF | RTWNSLVKHH | 19 | 10 | 26 | 41 | | 10613 |
| VIF | RTWNSLVK | 19 | 8 | 27 | 42 | | 10614 |
| VIF | IIGVSIEWR | 86 | 8 | 27 | 42 | | 10615 |
| VIF | GLADQLIII | 106 | 8 | 27 | 42 | | 10616 |
| VIF | PGLADQLIH | 105 | 9 | 27 | 42 | | 10617 |
| VIF | LGHGVSIEWR | 84 | 10 | 27 | 42 | | 10618 |
| VIF | YFDCFSESAIR | 116 | 11 | 27 | 42 | | 10619 |
| VIF | WGLHTGER | 72 | 8 | 28 | 44 | | 10620 |
| VIF | YPDCFSESA | 116 | 9 | 28 | 44 | | 10621 |
| VIF | DCFSESAIR | 118 | 9 | 28 | 44 | | 10622 |
| VIF | FDCFSESAIR | 117 | 10 | 28 | 44 | | 10623 |
| VIF | FDCFSESA | 117 | 8 | 29 | 45 | | 10624 |
| VIF | CFSESAIR | 119 | 8 | 29 | 4S | | 10625 |
| VIF | KLTEDRWNK | 177 | 9 | 29 | 45 | 0.0130 | 10626 |
| VIF | VGSLQYLALT | 147 | 11 | 30 | 47 | | 10627 |
| VIF | LTEDRWNK | 178 | 8 | 31 | 48 | 0.0003 | 10628 |
| VIF | SLQYLALTA | 149 | 9 | 31 | 48 | | 10629 |
| VIF | GSLQYLALTA | 148 | 10 | 31 | 48 | | 10630 |
| VIF | IVWQVDRMRI | 9 | 11 | 33 | S2 | | 10631 |
| VIF | QVDRMRIR | 32 | 8 | 34 | 53 | | 10632 |
| VIF | EDRWNKPQK | 180 | 9 | 39 | 61 | | 10633 |
| VIF | VMIVWQVDR | 7 | 11 | 41 | 64 | | 10634 |
| VIF | QVMIVWQVDR | 6 | 10 | 43 | 67 | | 10635 |
| VIF | MIVWQVDRM | 8 | 10 | 43 | 67 | 0.0062 | 10636 |
| VIF | AGIINKVGSLQ | 142 | 11 | 43 | 67 | | 10637 |
| VIF | SLYKIIIIMY | 23 | 8 | 44 | 69 | | 10638 |
| VIF | VMIVWQVDR | 7 | 9 | 44 | 69 | 0.0034 | 10639 |
| VIF | MIVWQVDR | 8 | 8 | 46 | 72 | | 10640 |
| VIF | IVWQVDRMR | 9 | 9 | 47 | 73 | 0.0008 | 10641 |
| VIF | KVGSLQYLA | 146 | 9 | 52 | 81 | 0.0036 | 10642 |
| VIF | VGSLQYLA | 147 | 8 | 58 | 91 | | 10643 |
| VPR | LPGRRGR | 85 | 8 | 01 | 50 | | 10644 |
| VPR | NIRGRRVR | 85 | 8 | 01 | 50 | | 10645 |
| VPR | #LPGRRGRNG | 85 | 11 | 01 | 50 | | 10646 |
| VPR | WALELLEELK | 18 | 10 | 09 | 15 | | 10647 |
| VPR | QLLFVIIFR | 66 | 8 | 10 | 16 | | 10648 |
| VPR | HSRIGIIR | 79 | 8 | 10 | 16 | | 10649 |
| VPR | RIGITRQR | 81 | 8 | 10 | 16 | | 10650 |
| VPR | IGITRQRR | 82 | 8 | 10 | 16 | | 10651 |
| VPR | ALELLEELK | 19 | 9 | 10 | 16 | | 10652 |
| VPR | RIGITRQRR | 81 | 9 | 10 | 16 | | 10653 |
| VPR | IISRIGITRQR | 79 | 10 | 10 | 16 | | 10654 |
| VPR | HSRIGITRQRR | 79 | 11 | 10 | 16 | | 10655 |
| VPR | WLHGLGQY | 38 | 8 | 11 | 17 | | 10656 |
| VPR | HFRIGCRH | 71 | 8 | 11 | 17 | | 10657 |
| VPR | HSRIGITR | 79 | 8 | 11 | 17 | | 10658 |
| VPR | FIHFRIGCR | 69 | 9 | 11 | 17 | | 10659 |
| VPR | LPIIIFRIGCR | 68 | 10 | 11 | 17 | | 10660 |
| VPR | PIIIFRIGCRH | 69 | 10 | 11 | 17 | | 10661 |
| VPR | PVIIFRIGCQII | 69 | 10 | 11 | 17 | | 10662 |
| VPR | HFRIGCRIISR | 71 | 10 | 11 | 17 | | 10663 |
| VPR | LLPIIIFRIGCR | 67 | 11 | 11 | 37 | | 10664 |
| VPR | LFIHFRIGCRII | 68 | 11 | 11 | 17 | | 10665 |
| VPR | LFVIIFRIGCQII | 68 | 11 | 11 | 17 | | 10666 |
| VPR | RIGCRIISR | 74 | 8 | 12 | 19 | | 10667 |
| VPR | LGQHIYNTY | 42 | 9 | 13 | 20 | | 10668 |
| VPR | LGQYIYETY | 42 | 9 | 13 | 20 | | 10669 |
| VPR | HFPRIWLH | 33 | 8 | 14 | 22 | | 10670 |
| VPR | KSEAVRHFPR | 27 | 10 | 14 | 22 | | 10671 |
| VPR | AVRHFPRIWL | 30 | 11 | 14 | 22 | | 10672 |
| VPR | KSEAVRHF | 27 | 8 | 15 | 23 | | 10673 |
| VPR | ELKSEAVRHF | 25 | 10 | 15 | 23 | | 10674 |
| VPR | ELKSEAVR | 25 | 8 | 16 | 25 | | 10675 |
| VPR | ETYGDTWA | 48 | 8 | 16 | 25 | | 10676 |
| VPR | DTWAGVEA | 52 | 8 | 16 | 25 | | 10677 |
| VPR | AGVEAIIR | 55 | 8 | 16 | 25 | | 10678 |
| VPR | LLEELKSEA | 22 | 9 | 16 | 25 | | 10679 |
| VPR | ELKSEAVRH | 25 | 9 | 16 | 25 | | 10680 |
| VPR | GDTWAGVEA | 51 | 9 | 16 | 25 | | 10681 |
| VPR | WAGVEAIIR | 54 | 9 | 16 | 25 | | 10682 |
| VPR | ELLEELKNEA | 21 | 10 | 16 | 25 | | 10683 |
| VPR | ELLEELKSEA | 21 | 10 | 16 | 25 | | 10684 |
| VPR | YGDTWAGVEA | 50 | 10 | 16 | 25 | | 10685 |
| VPR | LLIEELKSEAVR | 22 | 11 | 16 | 25 | | 10686 |
| VPR | DTWAGVEAIIR | 52 | 11 | 16 | 25 | | 10687 |
| VPR | ELKNEAVR | 25 | 8 | 17 | 27 | | 10688 |
| VPR | LLEELKNEA | 22 | 9 | 17 | 27 | | 10689 |
| VPR | ELKNEAVRH | 25 | 9 | 17 | 27 | | 10690 |
| VPR | LGQIIIYETY | 42 | 9 | 17 | 27 | | 10691 |
| VPR | ELKNEAVRIIF | 25 | 10 | 17 | 27 | | 10692 |
| VPR | LLELLKNIEAVR | 22 | 11 | 17 | 27 | | 10693 |
| VPR | EGVEAIIR | 55 | 8 | 18 | 28 | | 10694 |
| VPR | DTWEGVEAIIR | 52 | 11 | 18 | 28 | | 10695 |
| VPR | RARNGASR | 93 | 8 | 19 | 30 | | 10696 |
| VPR | WLHCLGQII | 38 | 8 | 20 | 31 | | 10697 |
| VPR | IIGLGQIIIY | 40 | 8 | 20 | 31 | | 10698 |
| VPR | WLIIGLGQIIIY | 38 | 10 | 20 | 31 | | 10699 |
| VPR | DTWEGVEA | 52 | 8 | 23 | 36 | | 10700 |
| VPR | GDTWEGVEA | 51 | 9 | 23 | 36 | | 10701 |
| VPR | YGDTWIEGVEA | 50 | 10 | 23 | 36 | | 10702 |
| VPR | LFIIIFRIGCQII | 68 | 11 | 29 | 45 | | 10703 |
| VPR | FIIIFRIGCQII | 69 | 10 | 30 | 47 | | 10704 |
| VPR | IIFPRPWLH | 33 | 8 | 31 | 49 | | 10705 |
| VPR | AVRHFPRPWL | 30 | 11 | 31 | 48 | | 10706 |
| VPR | RILQQLLFIIIF | 62 | 11 | 34 | 53 | | 10707 |
| VPR | ILQQLLFIIIF | 63 | 10 | 35 | 55 | 0.0130 | 10708 |
| VPR | ILQQLLFIIIFR | 63 | 11 | 35 | 55 | | 10709 |
| VPR | RILQQLLFIII | 62 | 10 | 36 | 56 | | 10710 |
| VPR | ILQQLLFIII | 63 | 9 | 37 | 58 | | 10711 |
| VPR | EDQGPQREPY | 6 | 10 | 37 | 58 | | 10712 |
| VPR | AIIRILQQLLF | 59 | 11 | 38 | 59 | | 10713 |
| VPR | QAPEDQGPQR | 3 | 10 | 39 | 62 | | 10714 |
| VPR | IIRILQQLLF | 60 | 10 | 41 | 64 | | 10715 |
| VPR | WTLELLEELK | 18 | 10 | 42 | 69 | | 10716 |
| VPR | QGPQREPY | 8 | 8 | 43 | 68 | | 10717 |
| VPR | QLLFIIIFR | 66 | 8 | 44 | 69 | | 10718 |
| VPR | HFRIGCQII | 71 | 8 | 44 | 69 | | 10719 |
| VPR | TLELLEELK | 19 | 9 | 44 | 69 | | 10720 |
| VPR | HFRIGCQIISR | 71 | 10 | 44 | 69 | | 10721 |
| VPR | RILQQLLF | 62 | 8 | 45 | 70 | | 10722 |
| VPR | RIGCQHSR | 74 | 8 | 47 | 73 | | 10723 |
| VPR | EAVRIIFPR | 29 | 8 | 59 | 92 | | 10724 |
| VPU | IDYRLGVGA | 9 | 9 | 01 | 33 | | 10725 |
| VPU | VOYRIVIVA | 9 | 9 | 01 | 33 | | 10726 |
| VPU | VDYRLGVGA | 9 | 9 | 01 | 33 | | 10727 |
| VPU | KVDYRIVIVA | 7 | 10 | 01 | 33 | | 10728 |
| VPU | KVDYRLGVGA | 7 | 10 | 01 | 33 | | 10729 |
| VPU | RIDYRLGVGA | 7 | 10 | 01 | 33 | | 10730 |
| VPU | VDYRIVIVAF | 9 | 10 | 01 | 33 | | 10731 |
| VPU | KVDYRIVIVAF | 7 | 11 | 01 | 33 | | 10732 |
| VPU | LVQRKQDR | 43 | 8 | 01 | 50 | | 10733 |
| VPU | GVEMGHHA | 91 | 8 | 01 | 50 | | 10734 |
| VPU | VTLLSSSK | 94 | 8 | 01 | 50 | | 10735 |
| VPU | LVQRKQDKR | 43 | 9 | 01 | 50 | | 10736 |
| VPU | LVTLLSSSK | 91 | 9 | 01 | 50 | | 10737 |
| VPU | RIKEIRDDSDY | 64 | 11 | 01 | 50 | | 10738 |
| VPU | RIREIRDDSDY | 64 | 11 | 01 | 50 | | 10739 |
| VPU | LAIVALVVA | 13 | 9 | 09 | 15 | | 10740 |
| VPU | WTIVFIEYR | 34 | 9 | 10 | 16 | | 10741 |
| VPU | TIVFIEYR | 35 | 8 | 10 | 16 | | 10742 |
| VPU | IDRLIDRIR | 54 | 9 | 10 | 16 | | 10743 |
| VPU | RLIDRIRER | 56 | 9 | 10 | 16 | | 10744 |
| VPU | KIDRLIORIR | 52 | 10 | 10 | 16 | | 10745 |
| VPU | VVWTIVFIEYR | 31 | 11 | 10 | 16 | | 10746 |
| VPU | ESEGDQEELSA | 75 | 11 | 10 | 16 | | 10747 |
| VPU | EGDQEELSA | 77 | 9 | 11 | 17 | | 10748 |
| VPU | WTIVFIEY | 34 | 8 | 12 | 19 | | 10749 |
| VPU | AIVALYVA | 14 | 8 | 12 | 19 | | 10750 |
| VPU | IVFIEVRK | 36 | 8 | 12 | 19 | | 10751 |
| VPU | IDRIRERA | 59 | 8 | 12 | 19 | | 10752 |
| VPU | LIDRIRIERA | 58 | 9 | 12 | 19 | | 10753 |
| VPU | VVWTIVFIEY | 31 | 10 | 12 | 19 | | 10754 |
| VPU | IVVWTIVFIEY | 30 | 11 | 12 | 19 | | 10755 |
| VPU | GDQEELSA | 78 | 8 | 14 | 22 | | 10756 |
| VPU | LIDRIRER | 58 | 8 | 14 | 22 | | 10757 |
| VPU | AIVVWTIVF | 29 | 9 | 14 | 22 | | 10758 |
| VPU | IVVWTIVF | 30 | 8 | 15 | 23 | | 10759 |
| VPU | KIDRLIDR | 52 | 8 | 15 | 23 | | 10760 |
| VPU | ILRQRKIDR | 46 | 9 | 15 | 23 | | 10761 |
| VPU | KILRQRKIDR | 45 | 10 | 15 | 23 | 0.0039 | 10762 |

[0397] TABLE XVII

HIV A11 Motif Peptides with Binding Information

| | | | | | | | |
|---|---|---|---|---|---|---|---|
| | | | No. of | | | | SEQ |
| | | | Amino | Sequence | Conservancy | | ID |
| Protein | Sequence | Position | Acids | Frequency | (%) | A*1101 | NO. |

| | | | | | | | |
|---|---|---|---|---|---|---|---|
| ENV | IGPGQTFY | 361 | 8 | 01 | 25 | | 10763 |
| ENV | IGSGQAFY | 361 | 8 | 01 | 25 | | 10764 |
| ENV | GTAGNSSR | 375 | 8 | 01 | 33 | | 10765 |
| ENV | NNTSPRSR | 375 | 8 | 01 | 33 | | 10766 |
| ENV | ADNLWVTVY | 42 | 9 | 01 | 33 | | 10767 |
| ENV | GIGPGQTFY | 360 | 9 | 01 | 33 | | 10768 |
| ENV | SIGSGQAFY | 360 | 9 | 01 | 33 | | 10769 |
| ENV | ADNLWVTVYY | 42 | 10 | 01 | 33 | | 10770 |
| ENV | EGKNEINDTY | 217 | 10 | 01 | 33 | | 10771 |
| ENV | NTSPRSRVAY | 376 | 10 | 01 | 33 | | 10772 |
| ENV | TAGNSSRAAY | 376 | 10 | 01 | 33 | | 10773 |
| ENV | GTAGNSSRAA | 375 | 11 | 01 | 33 | | 10774 |
| ENV | NNTSPRSRVA | 375 | 11 | 01 | 33 | | 10775 |
| ENV | KLREIRQFENK | 405 | 11 | 01 | 25 | | 10776 |
| ENV | KNNTETNK | 535 | 8 | 01 | 50 | | 10777 |
| ENV | IINIIITPII | 584 | 8 | 01 | 50 | | 10778 |
| ENV | VISTRTIIR | 584 | 8 | 01 | 50 | | 10779 |
| ENV | INIIITPHR | 585 | 8 | 01 | 50 | | 10780 |
| ENV | STRTIIREK | 586 | 8 | 01 | 50 | | 10781 |
| ENV | SNNTSPRSR | 374 | 9 | 01 | 50 | | 10782 |
| ENV | NANITIPCR | 478 | 9 | 01 | 50 | | 10783 |
| ENV | IINHTPIIR | 584 | 9 | 01 | 50 | | 10784 |
| ENV | ISTRTIIREK | 585 | 9 | 01 | 50 | | 10785 |
| ENV | NIIITPIIREK | 586 | 9 | 01 | 50 | | 10786 |
| ENV | STRTIIREKR | 586 | 9 | 01 | 50 | | 10787 |
| ENV | VISTRTIIREK | 584 | 10 | 01 | 50 | | 10788 |
| ENV | INIHTPIIREK | 585 | 10 | 01 | 50 | | 10789 |
| ENV | ISTRTHREKR | 585 | 10 | 01 | 50 | | 10790 |
| ENV | NIIITPIIREKR | 586 | 10 | 01 | 50 | | 10791 |
| ENV | IITIEGNITLQCR | 478 | 11 | 01 | 50 | | 10792 |
| ENV | NANITIPCRIK | 478 | 11 | 01 | 50 | | 10793 |
| ENV | GNSTNGTETF | 535 | 11 | 01 | 50 | | 10794 |
| ENV | IINIIITPHREK | 584 | 11 | 01 | 50 | | 10795 |
| ENV | VISTRTHREKR | 584 | 11 | 01 | 50 | | 10796 |
| ENV | INIHTPHREKR | 585 | 11 | 01 | 50 | | 10797 |
| ENV | DSSNSTGNY | 218 | 9 | 01 | 20 | | 10798 |
| ENV | STNGTETFR | 537 | 9 | 01 | 17 | | 10799 |
| ENV | TNSSYTNDTY | 458 | 10 | 01 | 17 | | 10800 |
| ENV | NDTENNTEIFR | 537 | 11 | 01 | 17 | | 10801 |
| ENV | NTETNKTETF | 537 | 11 | 01 | 17 | | 10802 |
| ENV | NTTGNTTETF | 537 | 11 | 01 | 17 | | 10803 |
| ENV | NGSENGTETF | 537 | 11 | 02 | 33 | | 10804 |
| ENV | GSENGTETFR | 538 | 10 | 02 | 18 | | 10805 |
| ENV | NDTITLPCR | 477 | 9 | 03 | 20 | | 10806 |
| ENV | NDTITLPCRIK | 477 | 11 | 03 | 20 | | 10807 |
| ENV | RGWEALKY | 895 | 8 | 06 | 19 | | 10808 |
| ENV | KGLRLGWEGL | 891 | 11 | 08 | 27 | | 10809 |
| ENV | LGWEGLKY | 895 | 8 | 09 | 29 | | 10810 |
| ENV | RLGWEGLKY | 894 | 9 | 09 | 29 | | 10811 |
| ENV | GLRLGWEGLK | 892 | 11 | 09 | 29 | | 10812 |
| ENV | LGRRGWEALK | 883 | 10 | 09 | 15 | | 10813 |
| ENV | LLGRRGWEAL | 882 | 11 | 09 | 15 | | 10814 |
| ENV | RLGWEGLK | 894 | 8 | 10 | 32 | | 10815 |
| ENV | GLRLGWEGLK | 892 | 10 | 10 | 32 | | 10816 |
| ENV | ENLWVTVY | 43 | 8 | 10 | 17 | | 10817 |
| ENV | ENLWVTVYY | 43 | 9 | 10 | 17 | | 10818 |
| ENV | DIIGDIRQAII | 372 | 10 | 10 | 16 | | 10819 |
| ENV | NNTRKSIR | 350 | 8 | 10 | 16 | | 10820 |
| ENV | PLGVAPTR | 571 | 8 | 10 | 16 | | 10821 |
| ENV | DITNWLWY | 769 | 8 | 10 | 16 | | 10822 |
| ENV | DFILIAAR | 870 | 8 | 10 | 16 | | 10823 |
| ENV | STITQACPK | 243 | 9 | 10 | 16 | | 10824 |
| ENV | FDITNWLWY | 768 | 9 | 10 | 16 | | 10825 |
| ENV | RDFILIAAR | 869 | 9 | 10 | 16 | | 10826 |
| ENV | FAILKCNDKK | 269 | 10 | 10 | 16 | | 10827 |
| ENV | MLQLTVWGIK | 651 | 10 | 10 | 16 | | 10828 |
| ENV | RVLAVEKYLR | 665 | 10 | 10 | 16 | | 10829 |
| ENV | WFDITNWLW | 767 | 10 | 10 | 16 | | 10830 |
| ENV | EGIEEEGGER | 828 | 10 | 10 | 16 | | 10831 |
| ENV | GFAILKCNDKK | 268 | 11 | 10 | 16 | | 10832 |
| ENV | GDIIGDIRQAII | 371 | 11 | 10 | 11 | 10833 | |
| ENV | NVPWNSSWSN | 693 | 11 | 10 | 16 | | 10834 |
| ENV | WMEWEREIDN | 723 | 11 | 10 | 16 | | 10835 |
| ENV | IAIAVALGTDR | 925 | 11 | 10 | 16 | | 10836 |
| ENV | RGWEALKY | 886 | 8 | 11 | 18 | | 10837 |
| ENV | KLWVTVYY | 44 | 8 | 11 | 17 | | 10838 |
| ENV | WNSSWSNR | 696 | 8 | 11 | 17 | | 10839 |
| ENV | TITQACPK | 244 | 8 | 11 | 17 | | 10840 |
| ENV | IGPGQTFY | 358 | 8 | 11 | 17 | | 10841 |
| ENV | LAVERYLR | 667 | 8 | 11 | 17 | | 10842 |
| ENV | SNWLWYIK | 771 | 8 | 11 | 17 | | 10843 |
| ENV | NLCLFSYII | 859 | 8 | 11 | 17 | | 10844 |
| ENV | RIGPGQTFY | 357 | 9 | 11 | 17 | | 10845 |
| ENV | ITTHSFNCR | 431 | 9 | 11 | 17 | | 10846 |
| ENV | NITLPCRIK | 482 | 9 | 11 | 17 | | 10847 |
| ENV | VLAVERYLR | 666 | 9 | 11 | 17 | | 10848 |
| ENV | ISNWLWYIK | 770 | 9 | 11 | 17 | | 10849 |
| ENV | RNLCLFSYII | 858 | 9 | 11 | 17 | | 10850 |
| ENV | NLCLFSYHR | 859 | 9 | 11 | 17 | | 10851 |
| ENV | EITTHSFNCR | 430 | 10 | 11 | 17 | | 10852 |
| ENV | RNLCLFSYHR | 858 | 10 | 11 | 17 | | 10853 |
| ENV | YATGDIIGDIR | 368 | 11 | 11 | 17 | | 10854 |
| ENV | DLRNLCLFSYII | 856 | 11 | 11 | 17 | | 10855 |
| ENV | NLCLFSYHRLR | 859 | 11 | 11 | 17 | | 10856 |
| ENV | GNLWVTVY | 43 | 8 | 12 | 20 | | 10857 |
| ENV | GNLWVTVYY | 43 | 9 | 12 | 20 | | 10858 |
| ENV | TGDIIGDIR | 370 | 9 | 12 | 19 | | 10859 |
| ENV | EAQQIILLK | 646 | 8 | 12 | 19 | | 10860 |
| ENV | ILKCNDKK | 271 | 8 | 12 | 19 | | 10861 |
| ENV | TTIISFNCR | 432 | 8 | 12 | 19 | | 10862 |
| ENV | MTWMEWER | 721 | 8 | 12 | 19 | | 10863 |
| ENV | GGERDRDR | 834 | 8 | 12 | 19 | | 10864 |
| ENV | AILKCNDKK | 270 | 9 | 12 | 19 | | 10865 |
| ENV | LAEEEVVIR | 312 | 9 | 12 | 19 | 0.0002 | 10866 |
| ENV | INMWQEVGK | 493 | 9 | 12 | 19 | | 10867 |
| ENV | NMTWMEWER | 720 | 9 | 12 | 19 | | 10868 |
| ENV | GIEEEGGER | 829 | 9 | 12 | 19 | | 10869 |
| ENV | EGGERDRDR | 833 | 9 | 12 | 19 | | 10870 |
| ENV | SLAEEEVVIR | 311 | 10 | 12 | 19 | | 10871 |
| ENV | ATGDIIGDIR | 369 | 10 | 12 | 19 | | 10872 |
| ENV | IINMWQEVGK | 492 | 10 | 12 | 19 | | 10873 |
| ENV | AIEAQQHLLK | 644 | 10 | 12 | 19 | | 10874 |
| ENV | LLQYWSQELK | 906 | 10 | 12 | 19 | | 10875 |
| ENV | AILIIIPRRIR | 946 | 10 | 12 | 19 | | 10876 |
| ENV | PTRIRQGLER | 951 | 10 | 12 | 19 | | 10877 |
| ENV | KTTLFCASDA | 60 | 11 | 12 | 19 | | 10878 |
| ENV | GSLAEEEVVIR | 310 | 11 | 12 | 19 | | 10879 |
| ENV | QIINMWQEVG | 491 | 11 | 12 | 19 | | 10880 |
| ENV | KNEQELLELDK | 750 | 11 | 12 | 19 | | 10881 |
| ENV | GIEEEGGERDR | 829 | 11 | 12 | 19 | | 10882 |
| ENV | NLLQYWSQEL | 905 | 11 | 12 | 19 | | 10883 |
| ENV | RAILIIIPRRIR | 945 | 11 | 12 | 19 | | 10884 |
| ENV | SVEINCTR | 340 | 8 | 13 | 20 | | 10885 |
| ENV | GDIIGDIR | 371 | 8 | 13 | 20 | | 10886 |
| ENV | KLTVWGIK | 653 | 8 | 13 | 20 | | 10887 |
| ENV | RAILIIIPR | 945 | 8 | 13 | 20 | | 10888 |
| ENV | AILIIIPRR | 946 | 8 | 13 | 20 | | 10889 |
| ENV | KAKRRVVQR | 579 | 9 | 13 | 20 | 0.0002 | 10890 |
| ENV | RAILHIPRR | 945 | 9 | 13 | 20 | | 10891 |
| ENV | ILIIIPRRIR | 947 | 9 | 13 | 20 | | 10892 |
| ENV | TNVSTVQCTH | 286 | 10 | 13 | 20 | | 10893 |
| ENV | SGGDPEIVMH | 425 | 10 | 13 | 20 | | 10894 |
| ENV | LLKLTVWGIK | 651 | 10 | 13 | 20 | | 10895 |
| ENV | NTSVITQACPK | 241 | 11 | 13 | 20 | | 10896 |
| ENV | CTNVSTVQCT | 285 | 11 | 13 | 20 | | 10897 |
| ENV | SSGGDLEITTII | 424 | 11 | 13 | 20 | | 10898 |
| ENV | SSGGDPEIVMH | 424 | 11 | 13 | 20 | | 10899 |
| ENV | PTKAKRRVVQ | 576 | 11 | 13 | 20 | | 10900 |
| ENV | KAKRRVVQRE | 579 | 11 | 13 | 20 | | 10901 |
| ENV | HLLKLTVWGI | 650 | 11 | 13 | 20 | | 10902 |
| ENV | KNEQDLLALD | 750 | 11 | 13 | 20 | | 10903 |
| ENV | TGEIIGDIR | 370 | 9 | 14 | 23 | | 10904 |
| ENV | AITQACPK | 244 | 8 | 14 | 22 | | 10905 |
| ENV | GDPEIVMH | 427 | 8 | 14 | 22 | | 10906 |
| ENV | QDLLALDK | 753 | 8 | 14 | 22 | | 10907 |
| ENV | SAITQACPK | 243 | 9 | 14 | 22 | | 10908 |
| ENV | FAILKCNDK | 269 | 9 | 14 | 22 | 0.0002 | 10909 |
| ENV | GGDPEIVMH | 426 | 9 | 14 | 22 | | 10910 |
| ENV | TITLPCRIK | 482 | 9 | 14 | 22 | | 10911 |
| ENV | TSAITQACPK | 242 | 10 | 14 | 22 | | 10912 |
| ENV | TSVITQACPK | 242 | 10 | 14 | 22 | | 10913 |
| ENV | GFAILKCNDK | 268 | 10 | 14 | 22 | | 10914 |
| ENV | IFAVLSIVNR | 793 | 10 | 14 | 22 | | 10915 |
| ENV | NTSAITQACPK | 241 | 11 | 14 | 22 | | 10916 |
| ENV | AGFAILKCNDK | 267 | 11 | 14 | 22 | | 10917 |
| ENV | IIFAVLSIVNR | 792 | 11 | 14 | 22 | | 10918 |
| ENV | KIEPLGVAPTK | 568 | 11 | 15 | 24 | | 10919 |
| ENV | FDPIPIHY | 255 | 8 | 15 | 23 | | 10920 |
| ENV | PAGYAILK | 266 | 8 | 15 | 23 | | 10921 |
| ENV | NMWQEVGK | 494 | 8 | 15 | 23 | | 10922 |
| ENV | TNWLWYIK | 771 | 8 | 15 | 23 | | 10923 |
| ENV | ITNWLWYIK | 770 | 9 | 15 | 23 | | 10924 |
| ENV | SGGDLEITTII | 425 | 10 | 15 | 23 | | 10925 |
| ENV | IFRPGGGDMR | 545 | 10 | 15 | 23 | | 10926 |
| ENV | NMWQEVGKA | 494 | 11 | 15 | 23 | | 10927 |
| ENV | EIFRPGGGDMR | 544 | 11 | 15 | 23 | | 10928 |
| ENV | DDLRNLCLFSY | 855 | 11 | 15 | 23 | | 10929 |
| ENV | FNGTGPCK | 279 | 8 | 16 | 25 | | 10930 |
| ENV | RNLCLFSY | 858 | 8 | 16 | 25 | | 10931 |
| ENV | ITKWLWYIK | 770 | 9 | 16 | 25 | | 10932 |
| ENV | SFNCRGEFFY | 437 | 10 | 16 | 25 | | 10933 |
| ENV | DLRNLCLFSY | 856 | 10 | 16 | 25 | | 10934 |
| ENV | IISFNCRGEFFY | 434 | 11 | 16 | 25 | | 10935 |
| ENV | WNASWSNK | 696 | 8 | 17 | 27 | | 10936 |
| ENV | KAYDTEVII | 72 | 8 | 17 | 27 | | 10937 |
| ENV | VITQACPK | 244 | 8 | 17 | 27 | | 10938 |
| ENV | RVVQREKR | 587 | 8 | 17 | 27 | 0.0001 | 10939 |
| ENV | SVITQACPK | 243 | 9 | 17 | 27 | | 10940 |
| ENV | VAPTKAKRR | 574 | 9 | 17 | 27 | 0.0002 | 10941 |
| ENV | DAKAYDTEVH | 70 | 10 | 17 | 27 | | 10942 |
| ENY | GVAPTKAKRR | 573 | 10 | 17 | 27 | | 10943 |
| ENV | VFAVLSIVNR | 793 | 10 | 17 | 27 | | 10944 |
| ENV | SDAKAYDTEV | 69 | 11 | 17 | 27 | | 10945 |
| ENV | DTEVIINVWAT | 75 | 11 | 17 | 27 | | 10946 |
| ENV | NCTRPNNNTR | 344 | 11 | 17 | 27 | | 10947 |
| ENV | LGVAPTKAKR | 572 | 11 | 17 | 27 | | 10948 |
| ENV | IVFAVLSIVNR | 792 | 11 | 17 | 27 | | 10949 |
| ENV | WNSSWSNK | 696 | 8 | 18 | 29 | | 10950 |
| ENV | ENVTENFNMW | 100 | 11 | 18 | 29 | | 10951 |
| ENV | VLAVERYLK | 666 | 9 | 18 | 28 | | 10952 |
| ENV | RVLAVERYLK | 665 | 10 | 18 | 28 | | 10953 |
| ENV | NCRGEFFY | 439 | 8 | 19 | 30 | | 10954 |
| ENV | GVAPTKAK | 573 | 8 | 19 | 30 | | 10955 |
| ENV | VAPTKAKR | 574 | 8 | 19 | 30 | | 10956 |
| ENV | FNCRGEFFY | 438 | 9 | 19 | 30 | | 10957 |
| ENV | LGVAPTKAK | 572 | 9 | 19 | 30 | | 10958 |
| ENV | GVAPTKAKR | 573 | 9 | 19 | 30 | | 10959 |
| ENV | PLGVAPTKAK | 571 | 10 | 19 | 30 | | 10960 |
| ENV | LGVAPTKAKR | 572 | 10 | 19 | 30 | | 10961 |
| ENV | SSNITGLLLTR | 516 | 11 | 19 | 30 | | 10962 |
| ENV | PLGVAPTKAK | 571 | 11 | 19 | 30 | | 10963 |
| ENV | AILKCNDK | 270 | 8 | 20 | 31 | | 10964 |
| ENV | ETFRPGGGDM | 544 | 11 | 20 | 31 | | 10965 |
| ENV | LIEESQNQQEK | 740 | 11 | 20 | 31 | | 10966 |
| ENV | GDLEITTII | 427 | 8 | 21 | 33 | | 10967 |
| ENV | GGDLEITTH | 426 | 9 | 21 | 33 | | 10968 |
| ENV | TAIAVAEGTDR | 925 | 11 | 21 | 33 | | 10969 |
| ENV | RIVELLGR | 878 | 8 | 22 | 34 | | 10970 |
| ENV | IVELLGRR | 879 | 8 | 22 | 34 | | 10971 |
| ENV | RIVELLGRR | 878 | 9 | 22 | 34 | 0.0100 | 10972 |
| ENV | NCTRPNNNTR | 344 | 10 | 22 | 34 | | 10973 |
| ENV | CTRPNNNTRK | 345 | 10 | 22 | 34 | | 10974 |
| ENV | TTTLFCASDA | 60 | 11 | 22 | 34 | | 10975 |
| ENV | INCTRPNNNTR | 343 | 11 | 22 | 34 | | 10976 |
| ENV | TVQCTIIGIR | 290 | 9 | 23 | 36 | 0.0008 | 10977 |
| ENV | STVQCTIIGIR | 289 | 10 | 23 | 36 | | 10978 |
| ENV | VSTVQCTIIGIR | 288 | 11 | 23 | 36 | | 10979 |
| ENV | TFRPGGGDMR | 545 | 10 | 24 | 38 | | 10980 |
| ENV | ALAWDDLR | 851 | 8 | 25 | 39 | | 10981 |
| ENV | LALAWDDLR | 850 | 9 | 25 | 39 | | 10982 |
| ENV | KNVSTVQCTII | 286 | 10 | 25 | 39 | | 10983 |
| ENV | IVQQQNNLLR | 634 | 10 | 25 | 39 | 0.0190 | 10984 |
| ENV | FLALAWDDLR | 849 | 10 | 25 | 39 | | 10985 |
| ENV | GIVQQQNNLLR | 633 | 11 | 25 | 39 | | 10986 |
| ENV | GFLALAWDDL | 848 | 11 | 25 | 39 | | 10987 |
| ENV | ITLPCRIK | 483 | 8 | 26 | 41 | | 10988 |
| ENV | PLGVAPTK | 571 | 8 | 26 | 41 | | 10989 |
| ENV | LAVERYLK | 667 | 8 | 26 | 41 | | 10990 |
| ENV | KNNMVEQMH | 110 | 9 | 26 | 41 | | 10991 |
| ENV | IVQQQSNLLR | 634 | 10 | 26 | 41 | | 10992 |
| ENV | GIVQQQSNLLR | 633 | 11 | 26 | 41 | | 10993 |
| ENV | IIGDIRQAH | 377 | 9 | 27 | 44 | | 10994 |
| ENV | ESQNQQEK | 743 | 8 | 27 | 42 | | 10995 |
| ENV | IGDIRQAII | 378 | 8 | 28 | 44 | | 10996 |
| ENV | NNMVEQMII | 111 | 8 | 28 | 44 | | 10997 |
| ENV | TYQCTIIGIK | 290 | 9 | 28 | 44 | 0.0460 | 10998 |
| ENV | CTRPNNNTR | 345 | 9 | 28 | 44 | | 10999 |
| ENV | YSFEPIPIHY | 253 | 10 | 28 | 44 | | 11000 |
| ENV | STYQCTIIGIK | 289 | 10 | 28 | 44 | | 11001 |
| ENV | ASITLTVQAR | 619 | 10 | 28 | 44 | | 11002 |
| ENV | KYSFEPIPIHY | 252 | 11 | 28 | 44 | | 11003 |
| ENV | YCAPAGFAILK | 263 | 11 | 28 | 44 | | 11004 |
| ENV | YSTVQCTHGIK | 288 | 11 | 28 | 44 | | 11005 |
| ENV | AASITLTVQAR | 618 | 11 | 28 | 44 | | 11006 |
| ENV | YSFEPIPIII | 253 | 9 | 29 | 45 | | 11007 |
| ENV | KVSFEPIPIH | 252 | 10 | 29 | 45 | | 11008 |
| ENV | CAPAGFAILK | 264 | 10 | 29 | 45 | | 11009 |
| ENV | RSELYKYKVV | 558 | 11 | 29 | 45 | | 11010 |
| ENV | AYLSIVNR | 795 | 8 | 31 | 48 | | 11011 |
| ENV | AYAEGTDR | 928 | 8 | 31 | 48 | | 11012 |
| ENV | VTENFNMWK | 102 | 9 | 31 | 48 | | 11013 |
| ENV | SFEPIPIIIY | 254 | 9 | 31 | 48 | | 11014 |
| ENV | FAVLSIVNR | 794 | 9 | 31 | 48 | | 11015 |
| ENV | SLCLFSYIIR | 859 | 9 | 31 | 48 | | 11016 |
| ENV | IAVAEGTDR | 927 | 9 | 31 | 48 | 0.0003 | 11017 |
| ENV | NVTENFNMW | 101 | 10 | 31 | 48 | | 11018 |
| ENV | AVLSIVNRVR | 795 | 10 | 31 | 48 | | 11019 |
| ENV | RSLCLFSYHR | 858 | 10 | 31 | 48 | | 11020 |
| ENV | AIAVAEGTDR | 926 | 10 | 31 | 48 | | 11021 |
| ENV | FAVLSIVNRVR | 794 | 11 | 31 | 48 | | 11022 |
| ENV | DDLRSLCLFSY | 855 | 11 | 31 | 48 | | 11023 |
| ENV | SLCLFSYHRLR | 859 | 11 | 31 | 48 | | 11024 |
| ENV | ELYKYKVVK | 560 | 9 | 32 | 51 | | 11025 |
| ENV | RVVEREKR | 587 | 8 | 32 | 50 | | 11026 |
| ENV | ITLTVQAR | 621 | 8 | 32 | 50 | | 11027 |
| ENV | SLCLFSYII | 859 | 8 | 32 | 50 | | 11028 |
| ENV | SITLTVQAR | 620 | 9 | 32 | 50 | | 11029 |
| ENV | RSLCLFSYII | 858 | 9 | 32 | 50 | | 11030 |
| ENV | DLRSLCLFSYII | 856 | 11 | 32 | 50 | | 11031 |
| ENV | SFEPIPIII | 254 | 8 | 33 | 52 | | 11032 |
| ENV | RVLAVERY | 665 | 8 | 33 | 52 | | 11033 |
| ENV | QARVLAVER | 663 | 9 | 33 | 52 | 0.0003 | 11034 |
| ENV | QARVLAVERY | 663 | 10 | 33 | 52 | | 11035 |
| ENV | QLQARVLAVE | 661 | 11 | 33 | 52 | | 11036 |
| ENV | IMIVGGLIGLR | 781 | 11 | 34 | 54 | | 11037 |
| ENV | LLQLTVWGIK | 651 | 10 | 34 | 53 | 0.0110 | 11038 |
| ENV | IILLQLTVWGI | 650 | 11 | 34 | 53 | | 11039 |
| ENV | LSIVNRVRQGY | 797 | 11 | 34 | 53 | | 11040 |
| ENV | NLWVTVYY | 44 | 8 | 35 | 56 | | 11041 |
| ENV | NCGGIWFY | 439 | 8 | 35 | 55 | | 11042 |
| ENV | RSLCLFSY | 858 | 8 | 35 | 55 | | 11043 |
| ENV | EVIINVWATII | 77 | 9 | 35 | 55 | | 11044 |
| ENV | FNCGGEFFY | 438 | 9 | 35 | 55 | | 11045 |
| ENV | NITGLLLTR | 519 | 9 | 35 | 55 | 0.0001 | 11046 |
| ENV | SFNCGGEFFY | 437 | 10 | 35 | 55 | | 11047 |
| ENV | SNITGLLLTR | 517 | 10 | 35 | 55 | 0.0014 | 11048 |
| ENV | DLRSLCLFSY | 856 | 10 | 35 | 55 | | 11049 |
| ENV | HSFNCGGEFFY | 434 | 11 | 35 | 55 | | 11050 |
| ENV | GGGDMRDNW | 549 | 10 | 36 | 56 | | 11051 |
| ENV | MIVGGLIGLR | 782 | 10 | 36 | 56 | | 11052 |
| ENV | SIVNRVRQGY | 798 | 10 | 36 | 56 | 0.0008 | 11053 |
| ENV | PGGGDMRDN | 548 | 11 | 36 | 56 | | 11054 |
| ENV | ITGLLLTR | 520 | 8 | 37 | 58 | | 11055 |
| ENV | DMRDNWRSEL | 552 | 11 | 37 | 58 | | 11056 |
| ENV | PAGFAILK | 266 | 8 | 38 | 59 | | 11057 |
| ENV | LSIVNRVR | 797 | 8 | 38 | 59 | | 11058 |
| ENV | VLSIVNRVR | 796 | 9 | 38 | 59 | | 11059 |
| ENV | IVNRVRQGY | 799 | 9 | 38 | 59 | | 11060 |
| ENV | IISLWDQSLK | 121 | 10 | 38 | 59 | 0.0540 | 11061 |
| ENV | DIISLWDQSLK | 120 | 11 | 38 | 59 | | 11062 |
| ENV | GDMRDNWR | 551 | 8 | 39 | 61 | | 11063 |
| ENV | GGDMRDNWR | 550 | 9 | 39 | 61 | | 11064 |
| ENV | RDNWRSELY | 554 | 9 | 40 | 63 | 0.0001 | 11065 |
| ENV | RDNWRSELYK | 554 | 10 | 40 | 63 | 0.0028 | 11066 |
| ENV | TLFCASDAKA | 64 | 11 | 40 | 63 | | 11067 |
| ENV | RDNWRSELYK | 554 | 11 | 40 | 63 | | 11068 |
| ENV | TVYYGVPVWK | 48 | 10 | 41 | 64 | 7.8000 | 11069 |
| ENV | VTVYYGVPVW | 47 | 11 | 41 | 64 | 4.1000 | 11070 |
| ENV | CASDAKAY | 67 | 8 | 42 | 66 | | 11071 |
| ENV | LCLFSYIIR | 860 | 8 | 42 | 66 | | 11072 |
| ENV | FCASDAKAY | 66 | 9 | 42 | 66 | | 11073 |
| ENV | IVGGLIGLR | 783 | 9 | 42 | 66 | | 11074 |
| ENV | CLFSYIIRLR | 861 | 9 | 42 | 66 | | 11075 |
| ENV | LFCASDAKAY | 65 | 10 | 42 | 66 | 0.0002 | 11076 |
| ENV | LCLFSYIIRLR | 860 | 10 | 42 | 66 | | 11077 |
| ENV | VGGLIGLR | 784 | 8 | 43 | 67 | | 11078 |
| ENV | QLTVWGIK | 653 | 8 | 44 | 69 | | 11079 |
| ENV | LFSYIIRLR | 862 | 8 | 44 | 69 | | 11080 |
| ENV | RIRQGLER | 953 | 8 | 44 | 69 | | 11081 |
| ENV | VNRVRQGY | 800 | 8 | 45 | 71 | | 11082 |
| ENV | SLWDQSLK | 123 | 8 | 47 | 75 | | 11083 |
| ENV | ISLWDQSLK | 122 | 9 | 47 | 73 | 0.0890 | 11084 |
| ENV | WDQSLKPCVK | 125 | 10 | 47 | 73 | | 11085 |
| ENV | QSLKPCVK | 127 | 8 | 48 | 75 | | 11086 |
| ENV | TVWGIKQLQA | 655 | 11 | 48 | 75 | | 11087 |
| ENV | DNWRSELY | 555 | 8 | 49 | 77 | | 11088 |
| ENV | GIKQLQAR | 658 | 8 | 49 | 77 | | 11089 |
| ENV | DNWRSELYK | 555 | 9 | 49 | 77 | 0.0014 | 11090 |
| ENV | WGIKQLQAR | 657 | 9 | 49 | 77 | 0.0001 | 11091 |
| ENV | DNWRSELYKY | 555 | 10 | 49 | 77 | 0.0001 | 11092 |
| ENV | DNWRSELYKY | 555 | 11 | 49 | 77 | | 11093 |
| ENV | LGIWGCSGK | 679 | 9 | 50 | 78 | 0.0023 | 11094 |
| ENV | TTLFCASDAK | 61 | 10 | 50 | 78 | 0.2200 | 11095 |
| ENV | LLGIWGCSGK | 678 | 10 | 50 | 78 | 0.0120 | 11096 |
| ENV | NLLRAIEAQQH | 640 | 11 | 50 | 78 | | 11097 |
| ENV | QLLGIWGCSG | 677 | 11 | 50 | 78 | | 11098 |
| ENV | VSTVQCTH | 288 | 8 | 51 | 80 | | 11099 |
| ENV | RAIEAQQH | 643 | 8 | 51 | 80 | | 11100 |
| ENV | NVSTVQCTH | 287 | 9 | 51 | 80 | | 11101 |
| ENV | LLRAIEAQQH | 641 | 10 | 51 | 80 | | 11102 |
| ENV | GIWGCSGK | 680 | 8 | 52 | 81 | | 11103 |
| ENV | TLFCASDAK | 64 | 9 | 52 | 81 | 0.5300 | 11104 |
| ENV | RSELYKYK | 558 | 8 | 54 | 84 | | 11105 |
| ENV | LFCASDAK | 65 | 8 | 57 | 89 | | 11106 |
| GAG | AAAIMMQK | 405 | 8 | 01 | 25 | | 11107 |
| GAG | SATIMMQR | 405 | 8 | 01 | 25 | | 11108 |
| GAG | KDKDKELY | 535 | 8 | 01 | 25 | | 11109 |
| GAG | ETIDKDLY | 537 | 8 | 01 | 25 | | 11110 |
| GAG | NSATIMMQR | 404 | 9 | 01 | 33 | | 11111 |
| GAG | TAPPPESFR | 508 | 9 | 01 | 33 | | 11112 |
| GAG | NGKQANFLGK | 461 | 10 | 01 | 25 | | 11113 |
| GAG | NGRQANFLGK | 461 | 10 | 01 | 25 | | 11114 |
| GAG | PTAPPPESFR | 507 | 10 | 01 | 33 | | 11115 |
| GAG | NGKQANFLGK | 461 | 11 | 01 | 25 | | 11116 |
| GAG | NGRQANFLGK | 461 | 11 | 01 | 25 | | 11117 |
| GAG | PAAADKEK | 123 | 8 | 01 | 50 | | 11118 |
| GAG | ASAQQDLK | 392 | 8 | 01 | 50 | | 11119 |
| GAG | ATAQQDLK | 392 | 8 | 01 | 50 | | 11120 |
| GAG | AADKGVSQNY | 130 | 10 | 01 | 50 | | 11121 |
| GAG | SAQQDLKGGY | 393 | 10 | 01 | 50 | | 11122 |
| GAG | TAQQDLKGGY | 393 | 10 | 01 | 50 | | 11123 |
| GAG | GTRPGNYVQK | 480 | 10 | 01 | 50 | | 11124 |
| GAG | GTRPGNYVQR | 480 | 10 | 01 | 50 | | 11125 |
| GAG | ITSLPKQEQK | 526 | 10 | 01 | 50 | | 11126 |
| GAG | PAAADKEKDS | 123 | 11 | 01 | 50 | | 11127 |
| GAG | GANSIPVGDIY | 276 | 11 | 01 | 50 | | 11128 |
| GAG | PNQPIPVGDIY | 276 | 11 | 01 | 50 | | 11129 |
| GAG | ASAQQDLKGG | 392 | 11 | 01 | 50 | | 11130 |
| GAG | ATAQQDLKGG | 392 | 11 | 01 | 50 | | 11131 |
| GAG | EITSLPKQEQK | 525 | 11 | 01 | 50 | | 11132 |
| GAG | YTAVFMQR | 405 | 8 | 02 | 50 | | 11133 |
| GAG | TAPPAESFR | 508 | 9 | 02 | 67 | | 11134 |
| GAG | PTAPPAESFR | 507 | 10 | 02 | 67 | | 11135 |
| GAG | EGRQANFLGK | 462 | 10 | 02 | 100 | | 11136 |
| GAG | AADKGKVSQN | 129 | 11 | 02 | 18 | | 11137 |
| GAG | EADGKVSQNY | 129 | 10 | 04 | 36 | | 11138 |
| GAG | AAAIMMQK | 400 | 8 | 04 | 19 | | 11139 |
| GAG | AAIMMQKSNF | 406 | 11 | 06 | 15 | | 11140 |
| GAG | KTVKCFNCGK | 421 | 10 | 08 | 16 | | 11141 |
| GAG | GARASILR | 2 | 8 | 10 | 16 | | 11142 |
| GAG | PGNFPQSR | 483 | 8 | 10 | 16 | | 11143 |
| GAG | MGARASILR | 1 | 9 | 10 | 16 | | 11144 |
| GAG | KIWPSSKGR | 472 | 9 | 10 | 16 | | 11145 |
| GAG | TGNSSQVSQN | 139 | 11 | 10 | 16 | | 11146 |
| GAG | NFLGKIWPSSK | 468 | 11 | 10 | 16 | | 11147 |
| GAG | PVAPGQMR | 243 | 8 | 10 | 16 | | 11148 |
| GAG | MMQKSNFK | 409 | 8 | 10 | 16 | | 11149 |
| GAG | MMQRGNFK | 409 | 8 | 10 | 16 | | 11150 |
| GAG | KLDKWEKIR | 12 | 9 | 10 | 16 | | 11151 |
| GAG | GGKKKYKLK | 24 | 9 | 10 | 16 | 0.0001 | 11152 |
| GAG | RDTKEALDK | 97 | 9 | 10 | 16 | | 11153 |
| GAG | IMMQKSNFK | 408 | 9 | 10 | 16 | | 11154 |
| GAG | LGKIWPSSK | 470 | 9 | 10 | 16 | | 11155 |
| GAG | PGGKKKYKLK | 23 | 10 | 10 | 16 | | 11156 |
| GAG | GGKKKYKLKH | 24 | 10 | 10 | 16 | | 11157 |
| GAG | AGPVAPGQMR | 241 | 10 | 10 | 16 | | 11158 |
| GAG | FLGKIWPSSK | 469 | 10 | 10 | 16 | | 11159 |
| GAG | KLDKWEKIRL | 12 | 11 | 10 | 16 | | 11160 |
| GAG | PGGKKKYKLK | 23 | 11 | 10 | 16 | | 11161 |
| GAG | LGKIWPSSKGR | 470 | 11 | 10 | 16 | | 11162 |
| GAG | ATIMMQRGNF | 406 | 11 | 11 | 28 | | 11163 |
| GAG | PSQKQEPIDK | 528 | 10 | 11 | 18 | | 11164 |
| GAG | PIPVGDIY | 279 | 8 | 11 | 17 | | 11165 |
| GAG | TIKCFNCGK | 422 | 9 | 11 | 17 | | 11166 |
| GAG | TVKCFNCGK | 422 | 9 | 11 | 17 | | 11167 |
| GAG | GNSSQVSQNY | 140 | 10 | 12 | 23 | | 11168 |
| GAG | TIMMQRGNFR | 407 | 10 | 12 | 21 | | 11169 |
| GAG | QTGSEELR | 71 | 8 | 12 | 19 | | 11170 |
| GAG | FNCGKEGIIIAR | 426 | 11 | 12 | 19 | | 11171 |
| GAG | PGGKKKYK | 23 | 8 | 12 | 19 | | 11172 |
| GAG | TLYCVIIQK | 86 | 8 | 12 | 19 | | 11173 |
| GAG | DTKEALEK | 98 | 8 | 12 | 19 | | 11174 |
| GAG | MLNIVGGH | 208 | 8 | 12 | 19 | | 11175 |
| GAG | PTSILDIR | 303 | 8 | 12 | 19 | | 11176 |
| GAG | GSEELRSLY | 73 | 9 | 12 | 19 | | 11177 |
| GAG | ATLYCVIIQK | 85 | 9 | 12 | 19 | | 11178 |
| GAG | KDTKEALEK | 97 | 9 | 12 | 19 | | 11179 |
| GAG | MMLNIVGGII | 207 | 9 | 12 | 19 | | 11180 |
| GAG | TGSEELRSLY | 72 | 10 | 12 | 19 | | 11181 |
| GAG | VATLYCVIIQK | 84 | 10 | 12 | 19 | | 11182 |
| GAG | NMMLNIVGGII | 206 | 10 | 12 | 19 | | 11183 |
| GAG | YSPTSILDIR | 301 | 10 | 12 | 19 | | 11184 |
| GAG | RAEQASQEVK | 329 | 10 | 12 | 19 | | 11185 |
| GAG | RLRPGGKKKY | 20 | 11 | 12 | 19 | | 11186 |
| GAG | TVATLYCVIIQ | 83 | 11 | 12 | 19 | | 11187 |
| GAG | LNMMLNIVGG | 205 | 11 | 12 | 19 | | 11188 |
| GAG | SNPPIPVGEIY | 273 | 11 | 12 | 19 | | 11189 |
| GAG | TSILDIRQGPK | 304 | 11 | 12 | 19 | | 11190 |
| GAG | PGNFLQNR | 483 | 8 | 13 | 21 | | 11191 |
| GAG | IARNCRAPR | 434 | 9 | 13 | 21 | | 11192 |
| GAG | KIWPSNKGR | 472 | 9 | 13 | 21 | | 11193 |
| GAG | NCGKEGIIIAR | 427 | 10 | 13 | 21 | | 11194 |
| GAG | IARNCRAPRK | 434 | 10 | 13 | 21 | | 11195 |
| GAG | IARNCRAPRKK | 434 | 11 | 13 | 21 | | 11196 |
| GAG | NFLGKIWPSNK | 468 | 11 | 13 | 21 | | 11197 |
| GAG | KGRPGNFLQN | 478 | 11 | 13 | 21 | | 11198 |
| GAG | RIEVKDTK | 93 | 8 | 13 | 20 | | 11199 |
| GAG | IVKCFNCGK | 422 | 9 | 13 | 20 | | 11200 |
| GAG | CGKEGHIAR | 428 | 9 | 13 | 20 | | 11201 |
| GAG | EGHIARNCR | 431 | 9 | 13 | 20 | | 11202 |
| GAG | LGKIWPSNK | 470 | 9 | 13 | 20 | | 11203 |
| GAG | KLKHIVWASR | 31 | 10 | 13 | 20 | | 11204 |
| GAG | HIARNCRAPR | 433 | 10 | 13 | 20 | | 11205 |
| GAG | FLGKIWPSNK | 469 | 10 | 13 | 20 | | 11206 |
| GAG | EVKDTKEALD | 95 | 11 | 13 | 20 | | 11207 |
| GAG | AAEWDRVHPV | 230 | 11 | 13 | 20 | | 11208 |
| GAG | HIARNCRAPRK | 433 | 11 | 13 | 20 | | 11209 |
| GAG | LGKIWPSNKG | 470 | 11 | 13 | 20 | | 11210 |
| GAG | NSSQVSQNY | 144 | 9 | 14 | 31 | | 11211 |
| GAG | NCGKEGIIIAK | 427 | 10 | 14 | 22 | | 11212 |
| GAG | FNCGKEGIIIAK | 426 | 11 | 14 | 22 | | 11213 |
| GAG | IAKNCRAPRKK | 434 | 11 | 14 | 22 | | 11214 |
| GAG | QNAQGQMVII | 157 | 9 | 14 | 22 | | 11215 |
| GAG | RGNFRNQRK | 412 | 9 | 14 | 22 | | 11216 |
| GAG | CGKEGIIIAK | 428 | 9 | 14 | 22 | | 11217 |
| GAG | EGIIIAKNCR | 431 | 9 | 14 | 22 | | 11218 |
| GAG | FNTVATLYCV | 81 | 11 | 14 | 22 | | 11219 |
| GAG | TVATLYCVIIQ | 83 | 11 | 14 | 22 | | 11220 |
| GAG | IVQNAQGQMV | 155 | 11 | 14 | 22 | | 11221 |
| GAG | SSQVSQNY | 145 | 8 | 15 | 31 | | 11222 |
| GAG | RSLYNTVATL | 78 | 11 | 15 | 24 | | 11223 |
| GAG | FNTVATLY | 81 | 8 | 15 | 23 | | 11224 |
| GAG | TLYCVIIQR | 86 | 8 | 15 | 23 | | 11225 |
| GAG | AAEWDRVII | 230 | 8 | 15 | 23 | | 11226 |
| GAG | WDRVIIPVII | 233 | 8 | 15 | 23 | | 11227 |
| GAG | RGNFRNQR | 412 | 8 | 15 | 23 | | 11228 |
| GAG | LFNTVATLY | 80 | 9 | 15 | 23 | | 11229 |
| GAG | ATLYCVIIQR | 85 | 9 | 15 | 23 | 0.7100 | 11230 |
| GAG | EAAEWDRVH | 229 | 9 | 15 | 23 | | 11231 |
| GAG | TAPPEESFR | 496 | 9 | 15 | 23 | | 11232 |
| GAG | SGGKLDAWEK | 9 | 10 | 15 | 23 | | 11233 |
| GAG | SLFNTVATLY | 79 | 10 | 15 | 23 | | 11234 |
| GAG | VATLYCVIIQR | 84 | 10 | 15 | 23 | | 11235 |
| GAG | KIEEEQNKSK | 105 | 10 | 15 | 23 | | 11236 |
| GAG | RAEQATQDVK | 329 | 10 | 15 | 23 | | 11237 |
| GAG | PTAPPEESFR | 495 | 10 | 15 | 23 | | 11238 |
| GAG | LSGGKLDAWE | 8 | 11 | 15 | 23 | | 11239 |
| GAG | PGLLETSEGCR | 50 | 11 | 15 | 23 | | 11240 |
| GAG | KIEEEQNKSKK | 105 | 11 | 15 | 23 | | 11241 |
| GAG | MMQRGNFRN | 409 | 11 | 15 | 23 | | 11242 |
| GAG | IAKNCRAPRK | 434 | 10 | 16 | 25 | | 11243 |
| GAG | LDAWEKIR | 13 | 8 | 16 | 25 | | 11244 |
| GAG | NAQGQMVH | 158 | 8 | 16 | 25 | | 11245 |
| GAG | PVSILDIK | 303 | 8 | 16 | 25 | | 11246 |
| GAG | GNFRNQRK | 413 | 8 | 16 | 25 | | 11247 |
| GAG | KLDAWEKIR | 12 | 9 | 16 | 25 | | 11248 |
| GAG | GGKKKYRLK | 24 | 9 | 16 | 25 | | 11249 |
| GAG | LDAWEKIRLR | 13 | 10 | 16 | 25 | | 11250 |
| GAG | PGGKKKYRLK | 23 | 10 | 16 | 25 | | 11251 |
| GAG | GGKKKYRLKH | 24 | 10 | 16 | 25 | | 11252 |
| GAG | GLLETSEGCR | 51 | 10 | 16 | 25 | | 11253 |
| GAG | YSPVSILDIK | 301 | 10 | 16 | 25 | | 11254 |
| GAG | GGKLDAWEKI | 10 | 11 | 16 | 25 | | 11255 |
| GAG | KLDAWEKIRL | 12 | 11 | 16 | 25 | | 11256 |
| GAG | PGGKKKYRLK | 23 | 11 | 16 | 25 | | 11257 |
| GAG | VSILDIKQGPK | 304 | 11 | 16 | 25 | | 11258 |
| GAG | HIAKNCRAPRK | 433 | 11 | 16 | 25 | | 11259 |
| GAG | PIPPGQMR | 243 | 8 | 17 | 27 | | 11260 |
| GAG | GGKLDAWEK | 10 | 9 | 17 | 27 | | 11261 |
| GAG | DAWEKIRLR | 14 | 9 | 17 | 27 | | 11262 |
| GAG | LLETSEGCR | 52 | 9 | 17 | 27 | | 11263 |
| GAG | RLKHLVWASR | 31 | 10 | 17 | 27 | | 11264 |
| GAG | LDKIEEEQNK | 103 | 10 | 17 | 27 | | 11265 |
| GAG | AGPIPPGQMR | 241 | 10 | 17 | 27 | | 11266 |
| GAG | ALDKIEEEQNK | 102 | 11 | 17 | 27 | | 11267 |
| GAG | LSPRTLNAWV | 168 | 11 | 17 | 27 | | 11268 |
| GAG | IIAGPIPPGQMR | 240 | 11 | 17 | 27 | | 11269 |
| GAG | PIPPGQMREPR | 243 | 11 | 17 | 27 | | 11270 |
| GAG | IAKNCRAPR | 434 | 9 | 18 | 29 | 0.0003 | 11271 |
| GAG | LDKWEKIR | 13 | 8 | 18 | 28 | | 11272 |
| GAG | PVGDIYKR | 281 | 8 | 18 | 28 | | 11273 |
| GAG | PDCKTILR | 352 | 8 | 18 | 28 | | 11274 |
| GAG | LDKWEKIRLR | 13 | 10 | 18 | 28 | | 11275 |
| GAG | SILDIKQGPK | 305 | 10 | 18 | 28 | | 11276 |
| GAG | ANPDCKTILR | 350 | 10 | 18 | 28 | | 11277 |
| GAG | IIIAKNCRAPR | 433 | 10 | 18 | 28 | | 11278 |
| GAG | IIAGPIAPGQM | 240 | 11 | 18 | 28 | | 11279 |
| GAG | NNPPIPVGEIY | 273 | 11 | 18 | 28 | | 11280 |
| GAG | NANPDCKTILR | 349 | 11 | 18 | 28 | | 11281 |
| GAG | LARNCRAPRK | 434 | 11 | 19 | 30 | | 11282 |
| GAG | PIAPGQMR | 243 | 8 | 19 | 30 | | 11283 |
| GAG | LDIKQGPK | 307 | 8 | 19 | 30 | | 11284 |
| GAG | ILDIKQGPK | 306 | 9 | 19 | 30 | | 11285 |
| GAG | AGPIAPGQMR | 241 | 10 | 19 | 30 | | 11286 |
| GAG | IAPGQMREPR | 244 | 10 | 19 | 30 | | 11287 |
| GAG | RLRPGGKKKY | 20 | 11 | 19 | 30 | | 11288 |
| GAG | PIAPGQMREPR | 243 | 11 | 19 | 30 | | 11289 |
| GAG | DIKQGPKEPFR | 308 | 11 | 19 | 30 | | 11290 |
| GAG | LARNCRAPR | 434 | 9 | 20 | 32 | | 11291 |
| GAG | LARNCRAPRK | 434 | 10 | 20 | 32 | | 11292 |
| GAG | PGGKKKYR | 23 | 8 | 20 | 31 | | 11293 |
| GAG | IMMQRGNFR | 408 | 9 | 20 | 31 | | 11294 |
| GAG | KNCRAPRKK | 436 | 9 | 20 | 31 | | 11295 |
| GAG | IVWASRELER | 35 | 10 | 20 | 31 | 0.0066 | 11296 |
| GAG | IILARNCRAPR | 433 | 10 | 20 | 31 | | 11297 |
| GAG | HIVWASRELER | 34 | 11 | 20 | 31 | | 11298 |
| GAG | IILARNCRAPR | 433 | 11 | 20 | 31 | | 11299 |
| GAG | EGIILARNCR | 431 | 9 | 21 | 33 | | 11300 |
| GAG | KIWPSHKGR | 472 | 9 | 22 | 35 | 0.0005 | 11301 |
| GAG | GGPSHKAR | 378 | 8 | 22 | 34 | | 11302 |
| GAG | KNCRAPRK | 436 | 8 | 22 | 34 | | 11303 |
| GAG | VGGPSHKAR | 377 | 9 | 22 | 34 | | 11304 |
| GAG | SLYNTVATLY | 79 | 10 | 22 | 34 | | 11305 |
| GAG | GVGGPSIIKAR | 376 | 10 | 22 | 34 | | 11306 |
| GAG | QGVGGPSHKA | 375 | 11 | 22 | 34 | | 11307 |
| GAG | LGKIWPSHKG | 470 | 11 | 22 | 34 | | 11308 |
| GAG | NFLGKIWPSHK | 468 | 11 | 23 | 37 | | 11309 |
| GAG | YNTVATLY | 81 | 8 | 23 | 36 | | 11310 |
| GAG | KIEEEQNK | 105 | 8 | 23 | 36 | | 11311 |
| GAG | QGVGGPSH | 375 | 8 | 23 | 36 | | 11312 |
| GAG | GVGGPSIIK | 376 | 8 | 23 | 36 | | 11313 |
| GAG | MMQRGNFR | 409 | 8 | 23 | 36 | | 11314 |
| GAG | QGVGGPSIIK | 375 | 9 | 23 | 36 | | 11315 |
| GAG | LGKIWPSIIK | 470 | 9 | 23 | 36 | | 11316 |
| GAG | ACQGVGGPSH | 373 | 10 | 23 | 36 | | 11317 |
| GAG | FLGKIWPSIIK | 469 | 10 | 23 | 36 | 0.0013 | 11318 |
| GAG | YNTVATLYCV | 81 | 11 | 23 | 36 | | 11319 |
| GAG | TACQGVGGPS | 372 | 11 | 23 | 36 | | 11320 |
| GAG | ACQGVGGPSII | 373 | 11 | 23 | 36 | | 11321 |
| GAG | NCGKEGIILAR | 427 | 10 | 24 | 38 | | 11322 |
| GAG | FNCGKEGIILA | 426 | 11 | 24 | 38 | | 11323 |
| GAG | CGKEGIILAR | 428 | 9 | 24 | 38 | | 11324 |
| GAG | YSPVSILDIR | 301 | 10 | 24 | 38 | | 11325 |
| GAG | NFLGKIWPSH | 468 | 10 | 25 | 40 | | 11326 |
| GAG | PVSILDIR | 303 | 8 | 25 | 39 | | 11327 |
| GAG | LGKIWPSII | 470 | 8 | 25 | 39 | | 11328 |
| GAG | KDTKEALDK | 97 | 9 | 25 | 39 | | 11329 |
| GAG | FLGKIWPSII | 469 | 9 | 25 | 39 | | 11330 |
| GAG | VSILDIRQGPK | 304 | 11 | 25 | 39 | | 11331 |
| GAG | ANFLGKIWPSII | 467 | 11 | 25 | 39 | | 11332 |
| GAG | LVWASRELER | 35 | 10 | 26 | 41 | | 11333 |
| GAG | IILYWASRELE | 34 | 11 | 26 | 41 | | 11334 |
| GAG | MVIIQAISPR | 163 | 9 | 27 | 42 | 0.0670 | 11335 |
| GAG | VDRFFKTLR | 321 | 9 | 27 | 42 | | 11336 |
| GAG | QMVHQAISPR | 162 | 10 | 27 | 42 | 0.0010 | 11337 |
| GAG | YVDRFFKTLR | 320 | 10 | 27 | 42 | | 11338 |
| GAG | RAEQATQEVK | 329 | 10 | 27 | 42 | | 11339 |
| GAG | ANPDCKTILK | 350 | 10 | 27 | 42 | 0.0002 | 11340 |
| GAG | NANPDCKTILK | 349 | 11 | 27 | 42 | | 11341 |
| GAG | KGRPGNFLQS | 478 | 11 | 28 | 44 | | 11342 |
| GAG | PDCKTILK | 352 | 8 | 28 | 44 | | 11343 |
| GAG | VDRFYKTLR | 321 | 9 | 28 | 44 | | 11344 |
| GAG | PFRDYVDRFY | 316 | 10 | 28 | 44 | | 11345 |
| GAG | YVDRFYKTLR | 320 | 10 | 28 | 44 | 0.0006 | 11346 |
| GAG | PFRDYVDRFY | 316 | 11 | 28 | 44 | | 11347 |
| GAG | GARASVLSGG | 2 | 11 | 29 | 46 | | 11348 |
| GAG | ASVLSGGK | 5 | 8 | 29 | 45 | | 11349 |
| GAG | NLQGQMVH | 158 | 8 | 29 | 45 | | 11350 |
| GAG | WVKVIEEK | 176 | 8 | 29 | 45 | | 11351 |
| GAG | WDRLIIPVH | 233 | 8 | 29 | 45 | | 11352 |
| GAG | RDYVDRFY | 318 | 8 | 29 | 45 | | 11353 |
| GAG | RASVLSGGK | 4 | 9 | 29 | 45 | | 11354 |
| GAG | QNLQGQMVH | 157 | 9 | 29 | 45 | | 11355 |
| GAG | RDYVDRFYK | 318 | 9 | 29 | 45 | 0.0400 | 11356 |
| GAG | NAWVKVIEEK | 174 | 10 | 29 | 45 | | 11357 |
| GAG | IVQNLQGQMV | 155 | 11 | 29 | 45 | | 11358 |
| GAG | LNAWVKVIEE | 173 | 11 | 29 | 45 | | 11359 |
| GAG | AAEWDRLIIPV | 230 | 11 | 29 | 45 | | 11360 |
| GAG | PGNFLQSR | 483 | 8 | 30 | 48 | | 11361 |
| GAG | NAWVKVVEEK | 174 | 10 | 30 | 47 | 0.0002 | 11362 |
| GAG | KIRLRPGGKKK | 18 | 11 | 30 | 47 | | 11363 |
| GAG | LNAWVKVVEE | 173 | 11 | 30 | 47 | | 11364 |
| GAG | WVKVVEEK | 176 | 8 | 31 | 48 | 0.0001 | 11365 |
| GAG | RDYVDRFFK | 318 | 9 | 33 | 52 | | 11366 |
| GAG | RNCRAPRKK | 436 | 9 | 33 | 52 | | 11367 |
| GAG | PFRDYVDRFF | 316 | 11 | 33 | 52 | | 11368 |
| GAG | RNCRAPRK | 436 | 8 | 34 | 53 | | 11369 |
| GAG | RLRPGGKKK | 20 | 9 | 34 | 53 | | 11370 |
| GAG | RLRPGGKKKY | 20 | 10 | 34 | 53 | | 11371 |
| GAG | PIPVGEIYKR | 279 | 10 | 34 | 53 | 0.0001 | 11372 |
| GAG | PIPVGEIY | 279 | 8 | 35 | 55 | | 11373 |
| GAG | PIPYGEIYK | 279 | 9 | 35 | 55 | 0.0012 | 11374 |
| GAG | DTKEALDK | 98 | 8 | 36 | 56 | 0.0001 | 11375 |
| GAG | QGVGGPGH | 375 | 8 | 36 | 56 | | 11376 |
| GAG | QGVGGPGIIK | 375 | 9 | 36 | 56 | 0.0001 | 11377 |
| GAG | ACQGVGGPGII | 373 | 10 | 36 | 56 | | 11378 |
| GAG | ISPRTLNAWV | 168 | 11 | 36 | 56 | | 11379 |
| GAG | TACQGVGGPG | 372 | 11 | 36 | 56 | 0.0001 | 11380 |
| GAG | ACQGVGGPGII | 373 | 11 | 36 | 56 | | 11381 |
| GAG | QGVGGPGIIKA | 375 | 11 | 36 | 56 | | 11382 |
| GAG | GVGGPGIIK | 376 | 8 | 37 | 58 | 0.0018 | 11383 |
| GAG | GGPGIIKAR | 378 | 8 | 37 | 58 | | 11384 |
| GAG | VGGPGIIKAR | 377 | 9 | 37 | 58 | | 11385 |
| GAG | GVGGPGHKAR | 376 | 10 | 37 | 58 | 0.0001 | 11386 |
| GAG | AAEWDRLII | 230 | 8 | 39 | 61 | | 11387 |
| GAG | EAAEWDRLH | 229 | 9 | 39 | 61 | | 11388 |
| GAG | PVGEIYKR | 281 | 8 | 40 | 63 | 0.0001 | 11389 |
| GAG | TVATLYCVH | 83 | 9 | 40 | 63 | | 11390 |
| GAG | NTVATLYCVII | 82 | 10 | 40 | 63 | | 11391 |
| GAG | SILDIRQGPK | 305 | 10 | 40 | 63 | 0.7100 | 11392 |
| GAG | DIRQGPKEPFR | 308 | 11 | 41 | 64 | | 11393 |
| GAG | VATLYCVH | 84 | 8 | 42 | 66 | | 11394 |
| GAG | LDIRQGPK | 307 | 8 | 42 | 66 | | 11395 |
| GAG | ILDIRQGPK | 306 | 9 | 42 | 66 | 0.0048 | 11396 |
| GAG | NTMLNTVGGII | 206 | 10 | 42 | 66 | | 11397 |
| GAG | LNTMLNTVGG | 205 | 11 | 42 | 66 | | 11398 |
| GAG | TMLNTVGGH | 207 | 9 | 43 | 67 | | 11399 |
| GAG | KGCWKCGK | 444 | 8 | 44 | 69 | | 11400 |
| GAG | KIRLRPGGK | 18 | 9 | 44 | 69 | | 11401 |
| GAG | KIRLRPGGKK | 18 | 10 | 44 | 69 | 0.0010 | 11402 |
| GAG | KGCWKCGKEG | 444 | 11 | 44 | 69 | | 11403 |
| GAG | PGQMREPR | 246 | 8 | 45 | 70 | | 11404 |
| GAG | CGKEGHQMK | 449 | 9 | 45 | 70 | | 11405 |
| GAG | KCGKEGHQMK | 448 | 10 | 45 | 70 | | 11406 |
| GAG | MLNTVGGH | 208 | 8 | 47 | 73 | | 11407 |
| GAG | WASRELER | 37 | 8 | 48 | 75 | | 11408 |
| GAG | GCWKCGKEGH | 445 | 10 | 48 | 75 | | 11409 |
| GAG | RLRPGGKK | 20 | 8 | 49 | 77 | | 11410 |
| GAG | QMKDCTER | 455 | 8 | 49 | 77 | | 11411 |
| GAG | EGHQMKDCTE | 452 | 11 | 49 | 77 | | 11412 |
| GAG | RAPRKKGCWK | 439 | 10 | 51 | 80 | | 11413 |
| GAG | CTERQANFLG | 459 | 11 | 52 | 83 | | 11414 |
| GAG | NCRAPRKK | 437 | 8 | 53 | 84 | | 11415 |
| GAG | TINEEAAEWD | 225 | 11 | 53 | 83 | | 11416 |
| GAG | INEEAAEWDR | 226 | 10 | 55 | 86 | | 11417 |
| GAG | FNCGKEGII | 426 | 8 | 57 | 90 | | 11418 |
| GAG | WIILGLNK | 289 | 8 | 57 | 89 | | 11419 |
| GAG | CFNCGKEGH | 425 | 9 | 57 | 89 | | 11420 |
| GAG | IILGLNKIVR | 290 | 10 | 57 | 89 | 0.0006 | 11421 |
| GAG | KCFNCGKEGII | 424 | 10 | 57 | 89 | | 11422 |
| GAG | WIILGLNKIVR | 289 | 11 | 57 | 89 | | 11423 |
| GAG | ILGLNKIVRMY | 291 | 11 | 57 | 89 | | 11424 |
| GAG | ILGLNKIVR | 291 | 9 | 58 | 91 | 0.0001 | 11425 |
| GAG | LGLNKIVRMY | 292 | 10 | 58 | 91 | 0.0002 | 11426 |
| GAG | LLVQNANPDC | 345 | 11 | 58 | 91 | | 11427 |
| GAG | LGLNKIVR | 292 | 8 | 59 | 92 | | 11428 |
| GAG | LVQNANPDCK | 346 | 10 | 59 | 92 | 0.0110 | 11429 |
| GAG | LNKIVRMY | 294 | 8 | 60 | 94 | | 11430 |
| GAG | GLNKIVRMY | 293 | 9 | 60 | 94 | 0.0002 | 11431 |
| GAG | QAAMQMLK | 216 | 8 | 61 | 95 | | 11432 |
| GAG | QNANPDCK | 348 | 8 | 61 | 95 | | 11433 |
| GAG | GGIIQAAMQM | 213 | 11 | 61 | 95 | | 11434 |
| GAG | RTLNAWVK | 171 | 8 | 63 | 98 | 0.0560 | 11435 |
| GAG | QGPKEPFR | 311 | 8 | 63 | 98 | | 11436 |
| GAG | PFRDYVDR | 316 | 8 | 63 | 98 | | 11437 |
| GAG | QGPKEPFRDY | 311 | 10 | 63 | 98 | 0.0002 | 11438 |
| NEF | AADGVGAVSR | 42 | 10 | 09 | 15 | | 11439 |
| NEF | ANEGENNSLLII | 249 | 11 | 09 | 15 | | 11440 |
| NEF | VGWPAIRER | 11 | 9 | 10 | 17 | | 11441 |
| NEF | FDSRLAFII | 310 | 8 | 10 | 16 | | 11442 |
| NEF | FDSRLAFIIII | 310 | 9 | 10 | 16 | | 11443 |
| NEF | DSRLAFIIII | 311 | 8 | 10 | 16 | | 11444 |
| NEF | AVSQDLDK | 48 | 8 | 10 | 16 | | 11445 |
| NEF | PLRPMTFK | 102 | 8 | 10 | 16 | | 11446 |
| NEF | GAVSQDLDK | 47 | 9 | 10 | 16 | | 11447 |
| NEF | GLEGLIYSK | 125 | 9 | 10 | 16 | | 11448 |
| NEF | MARELHPEY | 321 | 9 | 10 | 16 | | 11449 |
| NEF | VGAVSQDLDK | 46 | 10 | 10 | 16 | | 11450 |
| NEF | QVPLRPMTFK | 100 | 10 | 10 | 16 | | 11451 |
| NEF | GAFDLSFFLK | 110 | 10 | 10 | 16 | | 11452 |
| NEF | GGLEGLIYSK | 124 | 10 | 10 | 16 | | 11453 |
| NEF | CFKLVPVDPR | 226 | 10 | 10 | 16 | | 11454 |
| NEF | HMARELHPEY | 320 | 10 | 10 | 16 | | 11455 |
| NEF | MARELHPEYY | 321 | 10 | 10 | 16 | | 11456 |
| NEF | GVGAVSQDLD | 45 | 11 | 10 | 16 | | 11457 |
| NEF | KGAFDLSFFLK | 109 | 11 | 10 | 16 | | 11458 |
| NEF | KGGLEGLIYSK | 122 | 11 | 10 | 16 | | 11459 |
| NEF | WCFKLVPVDP | 225 | 11 | 10 | 16 | | 11460 |
| NEF | NNSLLHPICQII | 254 | 11 | 10 | 16 | | 11461 |
| NEF | HMARELHPEY | 320 | 11 | 10 | 16 | | 11462 |
| NEF | MARELIIPEYY | 321 | 11 | 10 | 16 | | 11463 |
| NEF | ANEGENNCLL | 249 | 11 | 11 | 18 | | 11464 |
| NEF | AVSRDLEK | 48 | 8 | 11 | 17 | | 11465 |
| NEF | VSRDLEKII | 49 | 8 | 11 | 17 | | 11466 |
| NEF | KLVPVDPR | 228 | 8 | 11 | 17 | | 11467 |
| NEF | GAVSRDLEK | 47 | 9 | 11 | 17 | 0.0009 | 11468 |
| NEF | AVSRDLEKII | 48 | 9 | 11 | 17 | | 11469 |
| NEF | VGAVSRDLEK | 46 | 10 | 11 | 17 | | 11470 |
| NEF | GAVSRDLEKH | 47 | 10 | 11 | 17 | | 11471 |
| NEF | QNYTPGPGVR | 205 | 10 | 11 | 17 | | 11472 |
| NEF | NSLLIIPICQII | 255 | 10 | 11 | 17 | | 11473 |
| NEF | GVGAVSRDLE | 45 | 11 | 11 | 17 | | 11474 |
| NEF | VGAVSRDLEK | 46 | 11 | 11 | 17 | | 11475 |
| NEF | EGENNCLLII | 251 | 9 | 12 | 19 | | 11476 |
| NEF | YTPGPGVR | 207 | 8 | 12 | 19 | | 11477 |
| NEF | DILDLWVYII | 185 | 9 | 12 | 19 | | 11478 |
| NEF | QDILDLWVYII | 184 | 10 | 12 | 19 | | 11479 |
| NEF | EGENNSLLII | 251 | 9 | 13 | 21 | | 11480 |
| NEF | VDLSIIFLKEK | 112 | 10 | 13 | 20 | | 11481 |
| NEF | AVDLSIIFLKEK | 111 | 11 | 13 | 20 | | 11482 |
| NEF | VDLSIIFLK | 112 | 8 | 14 | 22 | | 11483 |
| NEF | DGLIYSKK | 172 | 8 | 14 | 22 | | 11484 |
| NEF | ELHPEFYK | 324 | 8 | 14 | 22 | | 11485 |
| NEF | AVDLSIIFLK | 111 | 9 | 14 | 22 | 1.1000 | 11486 |
| NEF | LDGLIYSKK | 171 | 9 | 14 | 22 | | 11487 |
| NEF | DGLIYSKKR | 172 | 9 | 14 | 22 | | 11488 |
| NEF | SLLHPICQH | 256 | 9 | 14 | 22 | | 11489 |
| NEF | GLDGLIYSKK | 125 | 10 | 14 | 22 | | 11490 |
| NEF | LDGLIYSKKR | 171 | 10 | 14 | 22 | | 11491 |
| NEF | GGLDGLIYSKK | 124 | 11 | 14 | 22 | | 11492 |
| NEF | GLDGLIYSKKR | 125 | 11 | 14 | 22 | | 11493 |
| NEF | NNCLLIIPMSQ | 254 | 11 | 14 | 22 | | 11494 |
| NEF | CLLHPMSQH | 256 | 9 | 15 | 23 | | 11495 |
| NEF | NCLLHPMSQII | 255 | 10 | 15 | 23 | | 11496 |
| NEF | QNYTPGPGIRY | 205 | 11 | 15 | 23 | | 11497 |
| NEF | LDGLIYSK | 171 | 8 | 16 | 25 | | 11498 |
| NEF | GLDGLIYSK | 125 | 9 | 16 | 25 | | 11499 |
| NEF | GGLDGLIYSK | 124 | 10 | 16 | 25 | | 11500 |
| NEF | KGGLDGLIYSK | 122 | 11 | 16 | 25 | | 11501 |
| NEF | RFPLTFGWCF | 216 | 11 | 17 | 27 | | 11502 |
| NEF | FFPDWQNY | 199 | 8 | 17 | 27 | | 11503 |
| NEF | LLHPMSQII | 257 | 8 | 17 | 27 | | 11504 |
| NEF | GFFPDWQNY | 198 | 9 | 17 | 27 | | 11505 |
| NEF | YTPGPGIRY | 207 | 9 | 17 | 27 | | 11506 |
| NEF | FDLSFFLKEK | 112 | 10 | 17 | 27 | | 11507 |
| NEF | QGFFPDWQNY | 196 | 10 | 17 | 27 | | 11508 |
| NEF | AFDLSFFLKEK | 111 | 11 | 17 | 27 | | 11509 |
| NEF | FDLSFFLK | 112 | 8 | 18 | 28 | | 11510 |
| NEF | LLIIPICQII | 257 | 8 | 18 | 28 | | 11511 |
| NEF | AFDLSFFLK | 111 | 9 | 18 | 28 | | 11512 |
| NEF | QNYTPGPGIR | 205 | 10 | 18 | 28 | | 11513 |
| NEF | GGLEGLIY | 124 | 8 | 19 | 30 | | 11514 |
| NEF | KGGLEGLIY | 122 | 9 | 19 | 30 | | 11515 |
| NEF | DILDLWVY | 185 | 8 | 20 | 31 | | 11516 |
| NEF | YTPGPGIR | 207 | 8 | 20 | 31 | | 11517 |
| NEF | QDILDLWVY | 184 | 9 | 20 | 31 | | 11518 |
| NEF | QNYTPGPGTR | 205 | 10 | 20 | 31 | | 11519 |
| NEF | GGLDGLIY | 124 | 8 | 21 | 33 | | 11520 |
| NEF | WVYIITQGY | 191 | 8 | 21 | 33 | | 11521 |
| NEF | YTPGPGTR | 207 | 8 | 21 | 33 | | 11522 |
| NEF | KGGLDGLIY | 122 | 9 | 21 | 33 | | 11523 |
| NEF | DLWVYIITQGY | 188 | 10 | 21 | 33 | | 11524 |
| NEF | LDLWVYIITQG | 187 | 11 | 21 | 33 | | 11525 |
| NEF | LSFFLKEK | 114 | 8 | 22 | 34 | | 11526 |
| NEF | ELIIPEYYK | 324 | 8 | 22 | 34 | | 11527 |
| NEF | DLSFFLKEK | 113 | 9 | 22 | 34 | | 11528 |
| NEF | EILDLWVYH | 185 | 9 | 22 | 34 | | 11529 |
| NEF | GLIYSKKR | 173 | 8 | 23 | 36 | | 11530 |
| NEF | LSIIFLKEK | 114 | 8 | 27 | 42 | | 11531 |
| NEF | DLSIIFLKEK | 113 | 9 | 27 | 42 | | 11532 |
| NEF | EILDLWVY | 185 | 8 | 33 | 52 | | 11533 |
| NEF | ILDLWVYII | 186 | 8 | 34 | 53 | | 11534 |
| NEF | YFPDWQNY | 199 | 8 | 36 | 56 | | 11535 |
| NEF | QGYFPDWQNY | 196 | 10 | 36 | 56 | 0.0017 | 11536 |
| NEF | LTFGWCFK | 221 | 8 | 39 | 61 | | 11537 |
| NEF | PLTFGWCFK | 219 | 9 | 39 | 61 | | 11538 |
| NEF | QVPLRPMTY | 100 | 9 | 46 | 72 | | 11539 |
| NEF | QVPLRPMTYK | 100 | 10 | 46 | 72 | 0.6300 | 11540 |
| NEF | PVRPQVPLR | 95 | 9 | 48 | 75 | | 11541 |
| NEF | GFPVRPQVPLR | 93 | 11 | 48 | 75 | | 11542 |
| NEF | PLRPMTYK | 102 | 8 | 49 | 77 | 0.0003 | 11543 |
| POL | STNSPTSR | 32 | 8 | 01 | 33 | | 11544 |
| POL | RANSPSSR | 35 | 8 | 01 | 33 | | 11545 |
| POL | NSTNSPTSR | 31 | 9 | 01 | 33 | | 11546 |
| POL | PTSRELQVR | 36 | 9 | 01 | 33 | | 11547 |
| POL | QTRANSPSSR | 33 | 10 | 01 | 33 | | 11548 |
| POL | QTRANSPTTR | 35 | 10 | 01 | 33 | | 11549 |
| POL | NSPTSRELQVR | 34 | 11 | 01 | 33 | | 11550 |
| POL | RANSPTTR | 37 | 8 | 01 | 50 | | 11551 |
| POL | PSSRELQVR | 39 | 9 | 01 | 50 | | 11552 |
| POL | PSRANSPTSR | 24 | 10 | 01 | 50 | | 11553 |
| POL | NSPSSRELQVR | 37 | 11 | 01 | 50 | | 11554 |
| POL | NSPTTRELQV | 39 | 11 | 01 | 50 | | 11555 |
| POL | NNSLSEAGAD | 55 | 11 | 05 | 25 | | 11556 |
| POL | NLAFPQGEAR | 5 | 10 | 10 | 16 | | 11557 |
| POL | ILIEICGII | 149 | 8 | 10 | 16 | | 11558 |
| POL | LIEICGIIK | 150 | 8 | 10 | 16 | | 11559 |
| POL | YAKMRTAII | 546 | 8 | 10 | 16 | | 11560 |
| POL | RSAHTNDVK | 550 | 9 | 10 | 16 | | 11561 |
| POL | ETWETWWTD | 588 | 10 | 10 | 16 | | 11562 |
| POL | ETWETWWTE | 588 | 10 | 10 | 16 | | 11563 |
| POL | VSLTDTTNQK | 659 | 10 | 10 | 16 | | 11564 |
| POL | ENLAFPQGEAR | 4 | 11 | 10 | 16 | | 11565 |
| POL | TGKYAKMRTA | 543 | 11 | 10 | 16 | | 11566 |
| POL | VVSLTDTTNQ | 658 | 11 | 10 | 16 | | 11567 |
| POL | QTKELQKQIIK | 961 | 11 | 10 | 16 | | 11568 |
| POL | QTRANSPTRR | 21 | 10 | 11 | 18 | | 11569 |
| POL | TNNETPGIR | 324 | 9 | 11 | 17 | | 11570 |
| POL | TNNETPGIRY | 324 | 10 | 11 | 17 | | 11571 |
| POL | LDGIDKAQEDII | 754 | 11 | 11 | 17 | | 11572 |
| POL | IGGFIKVK | 137 | 8 | 11 | 17 | | 11573 |
| POL | RIGPENPY | 238 | 8 | 11 | 17 | | 11574 |
| POL | TAIITNDVK | 551 | 8 | 11 | 17 | | 11575 |
| POL | QLTEVVQK | 559 | 8 | 11 | 17 | | 11576 |
| POL | IDKAQEDH | 757 | 8 | 11 | 17 | | 11577 |
| POL | VVPRRKVK | 1012 | 8 | 11 | 17 | | 11578 |
| POL | KIIKDYGK | 1019 | 8 | 11 | 17 | | 11579 |
| POL | GIGGFIKVK | 136 | 9 | 11 | 17 | | 11580 |
| POL | SLTDTTNQK | 660 | 9 | 11 | 17 | | 11581 |
| POL | GIDKAQEDII | 756 | 9 | 11 | 17 | | 11582 |
| POL | SNFTSTTVK | 871 | 9 | 11 | 17 | | 11583 |
| POL | KVVPRRKVK | 1011 | 9 | 11 | 17 | | 11584 |
| POL | GGIGGFIKVK | 135 | 10 | 11 | 17 | | 11585 |
| POL | ISRIGPENPY | 236 | 10 | 11 | 17 | | 11586 |
| POL | STNNETPGIR | 323 | 10 | 11 | 17 | | 11587 |
| POL | ESWTVNDIQK | 439 | 10 | 11 | 17 | | 11588 |
| POL | ETTNQKTELH | 663 | 10 | 11 | 17 | | 11589 |
| POL | DGIDKAQEDH | 755 | 10 | 11 | 17 | | 11590 |
| POL | GSNFTSTTVK | 870 | 10 | 11 | 17 | | 11591 |
| POL | GIQQEFGIPY | 886 | 10 | 11 | 17 | | 11592 |
| POL | SDIQTKELQK | 958 | 10 | 11 | 17 | | 11593 |
| POL | FNFPQITLWQR | 85 | 11 | 11 | 17 | | 11594 |
| POL | IGGIGGFIKVK | 134 | 11 | 11 | 17 | | 11595 |
| POL | KISRIGPENPY | 235 | 11 | 11 | 17 | | 11596 |
| POL | PSTNNETPGIR | 322 | 11 | 11 | 17 | | 11597 |
| POL | STNNETPGIRY | 323 | 11 | 11 | 17 | | 11598 |
| POL | VVSLTETTNQ | 658 | 11 | 11 | 17 | | 11599 |
| POL | NGSNFTSTTV | 869 | 11 | 11 | 17 | | 11600 |
| POL | AGIQQEFGIPY | 885 | 11 | 11 | 17 | | 11601 |
| POL | IDIIASDIQTK | 953 | 11 | 11 | 17 | | 11602 |
| POL | VDIIATDIQTK | 953 | 11 | 11 | 17 | | 11603 |
| POL | ASDIQTKELQK | 957 | 11 | 11 | 17 | | 11604 |
| POL | NSEIKVVPRRK | 1007 | 11 | 11 | 17 | | 11605 |
| POL | QTRANSPTSR | 21 | 10 | 12 | 19 | | 11606 |
| POL | IIKIQNFR | 969 | 8 | 12 | 19 | | 11607 |
| POL | QIYPGIKVK | 458 | 9 | 12 | 19 | | 11608 |
| POL | QDQWTYQIY | 526 | 9 | 12 | 19 | | 11609 |
| POL | IIKIQNFRVY | 969 | 10 | 12 | 19 | | 11610 |
| POL | ASQIYPGIKVK | 456 | 11 | 12 | 19 | | 11611 |
| POL | IIKIQNFRVYY | 969 | 11 | 12 | 19 | | 11612 |
| POL | AFPQGEAR | 7 | 8 | 12 | 19 | | 11613 |
| POL | TNQKTELII | 665 | 8 | 12 | 19 | | 11614 |
| POL | KTELQAIY | 668 | 8 | 12 | 19 | | 11615 |
| POL | LAFPQGEAR | 6 | 9 | 12 | 19 | | 11616 |
| POL | EINLPGKWK | 122 | 9 | 12 | 19 | | 11617 |
| POL | TTNQKTELII | 664 | 9 | 12 | 19 | | 11618 |
| POL | QIIKIQNFR | 968 | 9 | 12 | 19 | | 11619 |
| POL | VIQDNSEIK | 1003 | 9 | 12 | 19 | | 11620 |
| POL | NSEIKVVPR | 1007 | 9 | 12 | 19 | | 11621 |
| POL | VLEEINLPGK | 119 | 10 | 12 | 19 | | 11622 |
| POL | VVIQDNSEIK | 1002 | 10 | 12 | 19 | | 11623 |
| POL | DNSEIKVVPR | 1006 | 10 | 12 | 19 | | 11624 |
| POL | NSEIKVVPRR | 1007 | 10 | 12 | 19 | | 11625 |
| POL | TVLEEINLPGK | 118 | 11 | 12 | 19 | | 11626 |
| POL | EINLPGKWKPK | 122 | 11 | 12 | 19 | | 11627 |
| POL | QGQDQWTYQI | 524 | 11 | 12 | 19 | | 11628 |
| POL | RMRGAIITNDV | 548 | 11 | 12 | 19 | | 11629 |
| POL | TNQKTELQAIY | 665 | 11 | 12 | 19 | | 11630 |
| POL | QIIKIQNFRVY | 968 | 11 | 12 | 19 | | 11631 |
| POL | AVVIQDNSEIK | 1000 | 11 | 12 | 19 | | 11632 |
| POL | QDNSEIKVVPR | 1005 | 11 | 12 | 19 | | 11633 |
| POL | DNSEIKVVPRR | 1006 | 11 | 12 | 19 | | 11634 |
| POL | ELQKQIIK | 964 | 8 | 13 | 21 | | 11635 |
| POL | KTGKYARMR | 542 | 9 | 13 | 21 | | 11636 |
| POL | NLKTGKYARM | 540 | 11 | 13 | 21 | | 11637 |
| POL | EDINLPGK | 121 | 8 | 13 | 20 | | 11638 |
| POL | TGKYARMR | 543 | 8 | 13 | 20 | | 11639 |
| POL | YARMRGAH | 546 | 8 | 13 | 20 | | 11640 |
| POL | QVREQAEII | 916 | 8 | 13 | 20 | | 11641 |
| POL | DINLPGKWK | 122 | 9 | 13 | 20 | | 11642 |
| POL | VLEDINLPGK | 119 | 10 | 13 | 20 | | 11643 |
| POL | EDINLPGKWK | 121 | 10 | 13 | 20 | | 11644 |
| POL | RAKIEELREII | 388 | 10 | 13 | 20 | | 11645 |
| POL | TVQPIVLPEK | 429 | 10 | 13 | 20 | 5.6000 | 11646 |
| POL | AGRWPVKTIII | 857 | 10 | 13 | 20 | | 11647 |
| POL | IGQVREQAEH | 914 | 10 | 13 | 20 | | 11648 |
| POL | QVREQAEHLK | 916 | 10 | 13 | 20 | | 11649 |
| POL | TLWQRPLVTV | 91 | 11 | 13 | 20 | | 11650 |
| POL | LVTIKIGGQLK | 97 | 11 | 13 | 20 | | 11651 |
| POL | TVLEDINLPGK | 118 | 11 | 13 | 20 | | 11652 |
| POL | DINLPGKWKP | 122 | 11 | 13 | 20 | | 11653 |
| POL | KIEELREIILLK | 390 | 11 | 13 | 20 | | 11654 |
| POL | WTVQPIVLPEK | 428 | 11 | 13 | 20 | 0.0510 | 11655 |
| POL | TGKYARMRGA | 543 | 11 | 13 | 20 | | 11656 |
| POL | LAGRWPVKTI | 856 | 11 | 13 | 20 | | 11657 |
| POL | IIGQVREQAEH | 913 | 11 | 13 | 20 | | 11658 |
| POL | EIKVVPRRKAK | 1009 | 11 | 13 | 20 | | 11659 |
| POL | EFSSEQTR | 16 | 8 | 14 | 22 | | 11660 |
| POL | QIYPGIKVR | 458 | 9 | 14 | 22 | | 11661 |
| POL | ASQIYPGIKVR | 456 | 11 | 14 | 22 | | 11662 |
| POL | IATESIVIWGK | 567 | 11 | 14 | 22 | | 11663 |
| POL | ILIEICGK | 149 | 8 | 14 | 22 | | 11664 |
| POL | LIEICGKK | 150 | 8 | 14 | 22 | | 11665 |
| POL | QNPDIVIY | 363 | 8 | 14 | 22 | | 11666 |
| POL | NFTSTTVK | 872 | 8 | 14 | 22 | | 11667 |
| POL | IASDIQTK | 956 | 8 | 14 | 22 | | 11668 |
| POL | DSRDPLWK | 981 | 8 | 14 | 22 | | 11669 |
| POL | QILIEICGK | 148 | 9 | 14 | 22 | | 11670 |
| POL | ILIEICGKK | 149 | 9 | 14 | 22 | | 11671 |
| POL | IIASDIQTK | 955 | 9 | 14 | 22 | | 11672 |
| POL | RDSRDPLWK | 980 | 9 | 14 | 22 | | 11673 |
| POL | QILIEICGKK | 148 | 10 | 14 | 22 | | 11674 |
| POL | QNPDIVIYQY | 363 | 10 | 14 | 22 | | 11675 |
| POL | RTKIEELRQH | 388 | 10 | 14 | 22 | | 11676 |
| POL | PGIKVRQLCK | 461 | 10 | 14 | 22 | | 11677 |
| POL | DIIASDIQTK | 954 | 10 | 14 | 22 | | 11678 |
| POL | RDPLWKGPAK | 983 | 10 | 14 | 22 | | 11679 |
| POL | FSFPQITLWQR | 85 | 11 | 14 | 22 | | 11680 |
| POL | YDQILIEICGK | 146 | 11 | 14 | 22 | | 11681 |
| POL | KTPKFKLPIQK | 577 | 11 | 14 | 22 | | 11682 |
| POL | GIDKAQEEIIER | 756 | 11 | 14 | 22 | | 11683 |
| POL | QTRANSPTR | 21 | 9 | 15 | 24 | | 11684 |
| POL | LVEICTEMEK | 221 | 10 | 15 | 24 | 0.0120 | 11685 |
| POL | ELRQIILLR | 393 | 8 | 15 | 23 | | 11686 |
| POL | QGQDQWTY | 524 | 8 | 15 | 23 | | 11687 |
| POL | KTELQAIII | 668 | 8 | 15 | 23 | | 11688 |
| POL | EIKVVPRRK | 1009 | 9 | 15 | 23 | | 11689 |
| POL | LGIIQAQPDR | 695 | 10 | 15 | 23 | | 11690 |
| POL | VDKLVSAGIR | 740 | 10 | 15 | 23 | | 11691 |
| POL | IDKAQEEIIER | 757 | 10 | 15 | 23 | | 11692 |
| POL | ALVEICTEMEK | 220 | 11 | 15 | 23 | | 11693 |
| POL | KIEELRQIILLR | 390 | 11 | 15 | 23 | | 11694 |
| POL | TNQKTELQAIH | 665 | 11 | 15 | 23 | | 11695 |
| POL | ALGIIQAQPDR | 694 | 11 | 15 | 23 | | 11696 |
| POL | LVNQIIEQLIK | 709 | 11 | 15 | 23 | | 11697 |
| POL | QVDKLVSAGIR | 739 | 11 | 15 | 23 | | 11698 |
| POL | VDKLVSAGIRK | 740 | 11 | 15 | 23 | | 11699 |
| POL | IDKAQEEHERY | 757 | 11 | 15 | 23 | | 11700 |
| POL | KAQIEEIIER | 759 | 8 | 16 | 25 | | 11701 |
| POL | KAQEEIIERY | 759 | 9 | 16 | 25 | | 11702 |
| POL | NLAFQQGEAR | 5 | 10 | 16 | 25 | | 11703 |
| POL | KAQEEHERYH | 759 | 10 | 16 | 25 | | 11704 |
| POL | AFQQGEAR | 7 | 8 | 16 | 25 | | 11705 |
| POL | RANSPTRR | 26 | 8 | 16 | 25 | | 11706 |
| POL | SAHTNDVK | 551 | 8 | 16 | 25 | | 11707 |
| POL | IIQAQPDR | 697 | 8 | 16 | 25 | | 11708 |
| POL | KLVSAGIR | 742 | 8 | 16 | 25 | | 11709 |
| POL | LYSAGIRK | 743 | 8 | 16 | 25 | 0.0054 | 11710 |
| POL | EIKVVPRR | 1009 | 8 | 16 | 25 | | 11711 |
| POL | LAFQQGEAR | 6 | 9 | 16 | 25 | | 11712 |
| POL | GIIQAQPDR | 696 | 9 | 16 | 25 | | 11713 |
| POL | KLVSAGIRK | 742 | 9 | 16 | 25 | 0.0770 | 11714 |
| POL | ENLAFQQGEA | 4 | 11 | 16 | 25 | | 11715 |
| POL | RANSPTSR | 26 | 8 | 17 | 27 | | 11716 |
| POL | KIEELRQII | 390 | 8 | 17 | 27 | | 11717 |
| POL | ELREHLLK | 393 | 8 | 17 | 27 | | 11718 |
| POL | WGKTPKFK | 575 | 8 | 17 | 27 | | 11719 |
| POL | TIKIGGQLK | 99 | 9 | 17 | 27 | 0.0330 | 11720 |
| POL | VTIKIGGQLK | 98 | 10 | 17 | 27 | 0.2100 | 11721 |
| POL | TVQPIQLPEK | 429 | 10 | 17 | 27 | | 11722 |
| POL | VIWGKTPKFK | 573 | 10 | 17 | 27 | | 11723 |
| POL | TLWQRPLVTI | 91 | 11 | 17 | 27 | | 11724 |
| POL | WTVQPIQLPEK | 428 | 11 | 17 | 27 | | 11725 |
| POL | IVIWGKTPKFK | 572 | 11 | 17 | 27 | | 11726 |
| P01 | YFSVPLDKDFR | 304 | 11 | 18 | 29 | | 11727 |
| POL | NLKTGKYAKM | 540 | 11 | 18 | 29 | | 11728 |
| POL | PDIVIYQY | 365 | 8 | 18 | 28 | | 11729 |
| POL | SVPLDKDFR | 306 | 9 | 18 | 28 | | 11730 |
| POL | FSVPLDKDFR | 305 | 10 | 18 | 28 | | 11731 |
| POL | SVPLDKDFRK | 306 | 10 | 18 | 28 | | 11732 |
| POL | AGIKVKQLCK | 461 | 10 | 18 | 28 | | 11733 |
| POL | VNQIIEQLIK | 710 | 10 | 18 | 28 | | 11734 |
| POL | FSVPLDKDFRK | 305 | 11 | 18 | 28 | | 11735 |
| POL | SVPLDKDFRK | 306 | 11 | 18 | 28 | | 11736 |
| POL | YAGIKVKQLCK | 460 | 11 | 18 | 28 | | 11737 |
| POL | LVSQIIEQLIK | 709 | 11 | 18 | 28 | | 11738 |
| POL | VNQIIEQLIKK | 710 | 11 | 18 | 28 | | 11739 |
| POL | PLDKDFRK | 308 | 8 | 19 | 30 | | 11740 |
| POL | PLDKDFRKY | 308 | 9 | 19 | 30 | | 11741 |
| POL | KTGKYAKMR | 542 | 9 | 19 | 30 | | 11742 |
| POL | LDKDFRKY | 309 | 8 | 19 | 30 | | 11743 |
| POL | KIEELREH | 390 | 8 | 19 | 30 | | 11744 |
| POL | TGKYAKMR | 543 | 8 | 19 | 30 | | 11745 |
| POL | GAHTNDVK | 551 | 8 | 19 | 30 | | 11746 |
| POL | LTDTTNQK | 661 | 8 | 19 | 30 | | 11747 |
| POL | PLWKGPAK | 985 | 8 | 19 | 30 | | 11748 |
| POL | GIKVRQLCK | 462 | 9 | 19 | 30 | | 11749 |
| POL | RGAHTNDVK | 550 | 9 | 19 | 30 | | 11750 |
| POL | KVRQLCKLLR | 464 | 10 | 19 | 30 | | 11751 |
| POL | ATESIVIWGK | 568 | 10 | 19 | 30 | | 11752 |
| POL | VSQIIEQLIK | 710 | 10 | 19 | 30 | 0.0370 | 11753 |
| POL | MAGDDCVASR | 1028 | 10 | 19 | 30 | | 11754 |
| POL | VSQIIEQLIKK | 710 | 11 | 19 | 30 | | 11755 |
| POL | QMAGDDCVAS | 1027 | 11 | 19 | 30 | | 11756 |
| POL | QIYAGIKVK | 458 | 9 | 20 | 32 | | 11757 |
| POL | KVYLAWVPAH | 722 | 10 | 20 | 32 | 0.0036 | 11758 |
| POL | KAACWWAGIK | 879 | 10 | 20 | 32 | 0.0740 | 11759 |
| POL | ASQIYAGIKVK | 456 | 11 | 20 | 32 | | 11760 |
| POL | KVYLAWVPAH | 722 | 11 | 20 | 32 | 2.3000 | 11761 |
| POL | KFKLPIQK | 580 | 8 | 20 | 31 | | 11762 |
| POL | GDDCVASR | 1030 | 8 | 20 | 31 | | 11763 |
| POL | AGDDCVASR | 1029 | 9 | 20 | 31 | | 11764 |
| POL | VSLTETTNQK | 659 | 10 | 20 | 31 | | 11765 |
| POL | LLKLAGRWPV | 853 | 11 | 20 | 31 | | 11766 |
| POL | YFSVPLDK | 304 | 8 | 21 | 33 | | 11767 |
| POL | ACWWAGIK | 881 | 8 | 21 | 33 | | 11768 |
| POL | SLTETTNQK | 660 | 9 | 21 | 33 | | 11769 |
| POL | AACWWAGIK | 880 | 9 | 21 | 33 | 0.0470 | 11770 |
| POL | DAYFSVPLDK | 302 | 10 | 21 | 33 | | 11771 |
| POL | DLEIGQIIRTK | 381 | 10 | 21 | 33 | | 11772 |
| POL | QLCKLLRGTK | 467 | 10 | 21 | 33 | | 11773 |
| POL | IFAIKKKDSTK | 249 | 11 | 21 | 33 | | 11774 |
| POL | GDAYFSVPLD | 301 | 11 | 21 | 33 | | 11775 |
| POL | SDLEIGQHRTK | 380 | 11 | 21 | 33 | | 11776 |
| POL | SDFNLPPIVAK | 776 | 11 | 21 | 33 | | 11777 |
| POL | AGIKQEFGIPY | 885 | 11 | 21 | 33 | | 11778 |
| POL | EIGQIIRTK | 383 | 8 | 22 | 34 | | 11779 |
| POL | RTKIEELR | 388 | 8 | 22 | 34 | | 11780 |
| POL | YLAWVPAII | 724 | 8 | 22 | 34 | | 11781 |
| POL | LAWVPAIIK | 725 | 8 | 22 | 34 | | 11782 |
| POL | YLAWVPAIIK | 724 | 9 | 22 | 34 | 0.0570 | 11783 |
| POL | NFPQITLWQR | 86 | 10 | 22 | 34 | | 11784 |
| POL | MTKILEPFRK | 353 | 10 | 22 | 34 | 0.0380 | 11785 |
| POL | AGRWPVKVIH | 857 | 10 | 22 | 34 | | 11786 |
| POL | GIKQEFGIPY | 886 | 10 | 22 | 34 | 0.0002 | 11787 |
| POL | SMTKILEPFRK | 352 | 11 | 22 | 34 | | 11788 |
| POL | KTPKPRLPIQK | 577 | 11 | 22 | 34 | | 11789 |
| POL | LAGRWPVKVI | 856 | 11 | 22 | 34 | | 11790 |
| POL | KVYLSWVPAH | 722 | 10 | 23 | 37 | | 11791 |
| POL | KVYLSWVPAII | 722 | 11 | 23 | 37 | | 11792 |
| POL | KILEPFRK | 355 | 8 | 23 | 36 | | 11793 |
| POL | KVILVAVII | 823 | 8 | 23 | 36 | | 11794 |
| POL | SFPQITLWQR | 86 | 10 | 23 | 36 | | 11795 |
| POL | DFNLPPIVAK | 777 | 10 | 23 | 36 | | 11796 |
| POL | EGKVILVAVII | 821 | 10 | 23 | 36 | | 11797 |
| POL | LLKWGFTTPD | 398 | 11 | 23 | 36 | | 11798 |
| POL | LLRWGPTTPD | 398 | 11 | 23 | 36 | | 11799 |
| POL | IDIIATDIQTK | 953 | 11 | 23 | 36 | | 11800 |
| POL | NTPIFAIK | 246 | 8 | 24 | 38 | | 11801 |
| POL | GDDCVAGR | 1030 | 8 | 24 | 38 | | 11802 |
| POL | YNTPIFAIK | 245 | 9 | 24 | 38 | | 11803 |
| POL | NTPIFAIKK | 246 | 9 | 24 | 38 | | 11804 |
| POL | LCKLLRGTK | 468 | 9 | 24 | 38 | 0.0001 | 11805 |
| POL | AGDDCVAGR | 1029 | 9 | 24 | 38 | | 11806 |
| POL | YNTPIFAIKK | 245 | 10 | 24 | 38 | | 11807 |
| POL | NTPIFAIKKK | 246 | 10 | 24 | 38 | | 11808 |
| POL | MAGDDCVAGR | 1028 | 10 | 24 | 38 | | 11809 |
| POL | YNTPIFAIKKK | 245 | 11 | 24 | 38 | | 11810 |
| POL | QGQGQWTYQI | 524 | 11 | 24 | 38 | | 11811 |
| POL | KLGKAGYVTD | 643 | 11 | 24 | 38 | | 11812 |
| POL | TAYFLLKLAG | 849 | 11 | 24 | 38 | | 11813 |
| POL | QMAGDDCVAG | 1027 | 11 | 24 | 38 | | 11814 |
| POL | QGQWTYQIY | 526 | 9 | 25 | 40 | 0.0001 | 11815 |
| POL | PIFAIKKK | 248 | 8 | 25 | 39 | | 11816 |
| POL | QGQGQWTY | 524 | 8 | 25 | 39 | | 11817 |
| POL | FLLKLAGR | 852 | 8 | 25 | 39 | | 11818 |
| POL | YFLLKLAGR | 851 | 9 | 25 | 39 | | 11819 |
| POL | QLCKLLRGAK | 467 | 10 | 25 | 39 | | 11820 |
| POL | LGKAGYVTDR | 644 | 10 | 25 | 39 | | 11821 |
| POL | IDKAQEEIIEK | 757 | 10 | 25 | 39 | | 11822 |
| POL | PSKDLIAEIQK | 513 | 11 | 25 | 39 | | 11823 |
| POL | GIDKAQEEHEK | 756 | 11 | 25 | 39 | | 11824 |
| POL | IDKAQEEHEKY | 757 | 11 | 25 | 39 | | 11825 |
| POL | SDFNLPPVVAK | 776 | 11 | 25 | 39 | | 11826 |
| POL | RAKIEELR | 388 | 8 | 26 | 41 | | 11827 |
| POL | KFRLPIQK | 580 | 8 | 26 | 41 | | 11828 |
| POL | NLPPIVAK | 779 | 8 | 26 | 41 | | 11829 |
| POL | LCKLLRGAK | 468 | 9 | 26 | 41 | | 11830 |
| POL | FNLPPIVAK | 778 | 9 | 26 | 41 | | 11831 |
| POL | SNFTSAAVK | 871 | 9 | 26 | 41 | | 11832 |
| POL | DFNLPPVVAK | 777 | 10 | 26 | 41 | | 11833 |
| POL | GSNFTSAAVK | 870 | 10 | 26 | 41 | | 11834 |
| POL | TGQETAYFLL | 845 | 11 | 26 | 41 | | 11835 |
| POL | NGSNFTSAAV | 869 | 11 | 26 | 41 | | 11836 |
| POL | KAQEEIIEK | 759 | 8 | 27 | 43 | | 11837 |
| POL | ASQIYAGIK | 456 | 9 | 27 | 43 | 0.3400 | 11838 |
| POL | KAQEEIIEKY | 759 | 9 | 27 | 43 | | 11839 |
| POL | KAQEEHEKYH | 759 | 10 | 27 | 43 | | 11840 |
| POL | INLPGKWK | 123 | 8 | 27 | 42 | | 11841 |
| POL | EICTEMEK | 223 | 8 | 27 | 42 | | 11842 |
| POL | EIGQHRAK | 383 | 8 | 27 | 42 | | 11843 |
| POL | LVSSGIRK | 743 | 8 | 27 | 42 | | 11844 |
| POL | NLPPVVAK | 779 | 8 | 27 | 42 | | 11845 |
| POL | ETAYFLLK | 848 | 8 | 27 | 42 | 0.0430 | 11846 |
| POL | KLVSSGIRK | 742 | 9 | 27 | 42 | | 11847 |
| POL | FNLPPVVAK | 778 | 9 | 27 | 42 | | 11848 |
| POL | INLPGKWKPK | 123 | 10 | 27 | 42 | | 11849 |
| POL | DLEIGQIIRAK | 381 | 10 | 27 | 42 | | 11850 |
| POL | WASQIYAGIK | 455 | 10 | 27 | 42 | | 11851 |
| POL | KVKQLCKLLR | 464 | 10 | 27 | 42 | | 11852 |
| POL | EICTEMEKEGK | 223 | 11 | 27 | 42 | | 11853 |
| POL | SDLEIGQHRAK | 380 | 11 | 27 | 42 | | 11854 |
| POL | VDKLVSSGIRK | 740 | 11 | 27 | 42 | | 11855 |
| POL | ASQIYPGIK | 456 | 9 | 28 | 44 | | 11856 |
| POL | KDLIAEIQK | 515 | 9 | 28 | 44 | | 11857 |
| POL | NLKTGKYAK | 540 | 9 | 28 | 44 | | 11858 |
| POL | DLIAEIQK | 516 | 8 | 28 | 44 | | 11859 |
| POL | IVGAETFY | 626 | 8 | 28 | 44 | | 11860 |
| POL | NFTSAAVK | 872 | 8 | 28 | 44 | | 11861 |
| POL | CTEMEKEGK | 225 | 9 | 28 | 44 | 0.0001 | 11862 |
| POL | GIKVKQLCK | 462 | 9 | 28 | 44 | | 11863 |
| POL | PIVGAETFY | 625 | 9 | 28 | 44 | | 11864 |
| POL | QLIKKEKVY | 716 | 9 | 28 | 44 | | 11865 |
| POL | ICTEMEKEGK | 224 | 10 | 28 | 44 | | 11866 |
| POL | WASQIYPGIK | 455 | 10 | 28 | 44 | | 11867 |
| POL | KNLKTGKYAK | 539 | 10 | 28 | 44 | | 11868 |
| POL | NLKTGKYAR | 540 | 9 | 29 | 46 | 0.0001 | 11869 |
| POL | KLVSSGIR | 742 | 8 | 29 | 45 | | 11870 |
| POL | KNLKIGKYAR | 539 | 10 | 29 | 45 | | 11871 |
| POL | VIWGKTPKFR | 573 | 10 | 29 | 45 | | 11872 |
| POL | VDKLVSSGIR | 740 | 10 | 29 | 45 | | 11873 |
| POL | IVIWGKTPKFR | 572 | 11 | 29 | 45 | | 11874 |
| POL | QVDKLVSSGIR | 739 | 11 | 29 | 45 | | 11875 |
| POL | WGKTPKFR | 575 | 8 | 30 | 47 | | 11876 |
| POL | LTETTNQK | 661 | 8 | 30 | 47 | | 11877 |
| POL | ANRIETKLGK | 638 | 9 | 30 | 47 | 0.0001 | 11878 |
| POL | AANREIKLGK | 637 | 10 | 30 | 47 | 0.0016 | 11879 |
| POL | IIEQLIKKEK | 713 | 10 | 30 | 47 | 0.0003 | 11880 |
| POL | GAANRETKLG | 636 | 11 | 30 | 47 | | 11881 |
| POL | QIIEQLIKKEK | 712 | 11 | 30 | 47 | | 11882 |
| POL | ILKLAGRWPV | 853 | 11 | 30 | 47 | | 11883 |
| POL | KIILVAVII | 823 | 8 | 31 | 48 | | 11884 |
| POL | ETAYFILK | 848 | 8 | 31 | 48 | | 11885 |
| POL | YFILKLAGR | 851 | 9 | 31 | 48 | | 11886 |
| POL | EGKIILVAVH | 821 | 10 | 31 | 48 | | 11887 |
| POL | PSINNETPGIR | 322 | 11 | 31 | 48 | | 11888 |
| POL | TGQETAYFILK | 845 | 11 | 31 | 48 | | 11889 |
| POL | TAYFILKLAGR | 849 | 11 | 31 | 48 | | 11890 |
| POL | INNETPGIR | 324 | 9 | 32 | 51 | | 11891 |
| POL | INNETPGIRY | 324 | 10 | 32 | 51 | | 11892 |
| POL | FILKLAGR | 852 | 8 | 32 | 50 | | 11893 |
| POL | SINNETPGIR | 323 | 10 | 32 | 50 | | 11894 |
| POL | SINNETPGIRY | 323 | 11 | 32 | 50 | | 11895 |
| POL | SSMTKILEPFR | 351 | 11 | 32 | 50 | | 11896 |
| POL | QTKELQKQITK | 961 | 11 | 32 | 50 | 0.0100 | 11897 |
| POL | EMEKEGKISK | 229 | 10 | 33 | 52 | 0.0001 | 11898 |
| POL | DVKQLTEAVQ | 556 | 11 | 33 | 52 | 0.0240 | 11899 |
| POL | DIIATDIQTK | 954 | 10 | 34 | 53 | 0.0130 | 11900 |
| POL | ELQKQITK | 964 | 8 | 35 | 56 | | 11901 |
| POL | LIKKEKVY | 717 | 8 | 35 | 55 | | 11902 |
| POL | DSRDPIWK | 981 | 8 | 35 | 55 | | 11903 |
| POL | ETKLGKAGY | 641 | 9 | 35 | 55 | | 11904 |
| POL | IIATDIQTK | 955 | 9 | 35 | 55 | 0.0980 | 11905 |
| POL | QITKIQNFR | 968 | 9 | 35 | 55 | 0.0045 | 11906 |
| POL | RDSRDPIWK | 980 | 9 | 35 | 55 | | 11907 |
| POL | TDIQTKELQK | 958 | 10 | 35 | 55 | 0.0001 | 11908 |
| POL | RDPIWKGPAK | 983 | 10 | 35 | 55 | | 11909 |
| POL | ATDIQTKELQK | 957 | 11 | 35 | 55 | 0.1800 | 11910 |
| POL | QITKIQNFRVY | 968 | 11 | 35 | 55 | | 11911 |
| POL | ITKIQNFR | 969 | 8 | 36 | 57 | | 11912 |
| POL | ITKIQNFRVY | 969 | 10 | 36 | 57 | 0.0012 | 11913 |
| POL | ITKIQNFRVYY | 969 | 11 | 36 | 57 | | 11914 |
| POL | IATDIQTK | 956 | 8 | 36 | 56 | | 11915 |
| POL | PIWKGPAK | 985 | 8 | 36 | 56 | | 11916 |
| POL | NLPGKWKPK | 124 | 9 | 36 | 56 | | 11917 |
| POL | AIFQSSMTK | 347 | 9 | 36 | 56 | 0.9600 | 11918 |
| POL | PAIFQSSMTK | 346 | 10 | 36 | 56 | 0.0830 | 11919 |
| POL | VFAIKKKDSTK | 249 | 11 | 36 | 56 | | 11920 |
| POL | NTPVPAIK | 246 | 8 | 37 | 58 | 0.0003 | 11921 |
| POL | PVFAIKKK | 248 | 8 | 37 | 58 | 0.0001 | 11922 |
| POL | QLTEAVQK | 559 | 8 | 37 | 58 | | 11923 |
| POL | QIIEQLIK | 712 | 8 | 37 | 58 | | 11924 |
| POL | IIEQLIKK | 713 | 8 | 37 | 58 | | 11925 |
| POL | YLSWVPAII | 724 | 8 | 37 | 58 | | 11926 |
| POL | LSWVPAIIK | 725 | 8 | 37 | 58 | | 11927 |
| POL | YNTPVFAIK | 245 | 9 | 37 | 58 | 0.0002 | 11928 |
| POL | NTPVFAIKK | 246 | 9 | 37 | 58 | 0.0600 | 11929 |
| POL | QIIEQLIKK | 712 | 9 | 37 | 58 | 0.1600 | 11930 |
| POL | YLSWVPAHK | 724 | 9 | 37 | 58 | | 11931 |
| POL | VIQDNSDIK | 1003 | 9 | 37 | 58 | 0.0068 | 11932 |
| POL | YNTPVFAIKK | 245 | 10 | 37 | 58 | | 11933 |
| POL | NTPVFAIKKK | 246 | 10 | 37 | 58 | 0.0046 | 11934 |
| POL | VVIQDNSDIK | 1002 | 10 | 37 | 58 | 0.0210 | 11935 |
| POL | YNTPVFAIKKK | 245 | 11 | 37 | 58 | | 11936 |
| POL | AVVIQDNSDIK | 1000 | 11 | 37 | 58 | 0.0150 | 11937 |
| POL | IFQSSMTK | 348 | 8 | 38 | 59 | 0.0073 | 11938 |
| POL | ILKEPVHGVYY | 498 | 11 | 38 | 59 | | 11939 |
| POL | LDGIDKAQEEH | 754 | 11 | 39 | 62 | | 11940 |
| POL | AGYVTDRGR | 647 | 9 | 39 | 61 | | 11941 |
| POL | YVTDRGRQK | 649 | 9 | 39 | 61 | 0.0010 | 11942 |
| POL | KAGYVTDRGR | 646 | 10 | 39 | 61 | | 11943 |
| POL | LGIIQAQPDK | 695 | 10 | 39 | 61 | 0.0001 | 11944 |
| POL | DGIDKAQEEH | 755 | 10 | 39 | 61 | | 11945 |
| POL | PVHGVYYDPS | 505 | 11 | 39 | 61 | | 11946 |
| POL | AGYVTDRGRQ | 647 | 11 | 39 | 61 | | 11947 |
| POL | ALGIIQAQPDK | 694 | 11 | 39 | 61 | | 11948 |
| POL | DIKVVPRRKAK | 1009 | 11 | 39 | 61 | | 11949 |
| POL | VTDRGRQK | 650 | 8 | 40 | 63 | 0.0065 | 11950 |
| POL | IIQAQPDK | 697 | 8 | 40 | 63 | | 11951 |
| POL | GIIQAQPDK | 696 | 9 | 40 | 63 | 0.0400 | 11952 |
| POL | GIDKAQEEH | 756 | 9 | 40 | 63 | | 11953 |
| POL | NSDIKVVPR | 1007 | 9 | 40 | 63 | | 11954 |
| POL | ILKEPVHGVY | 498 | 10 | 40 | 63 | | 11955 |
| POL | DNSDIKVVPR | 1006 | 10 | 40 | 63 | | 11956 |
| POL | NSDIKVVPRR | 1007 | 10 | 40 | 63 | 0.0001 | 11957 |
| POL | EILKEPVHGVY | 497 | 11 | 40 | 63 | | 11958 |
| POL | WTYQIYQEPF | 529 | 11 | 40 | 63 | 0.0540 | 11959 |
| POL | QIYQEPFKNLK | 532 | 11 | 40 | 63 | 0.2900 | 11960 |
| POL | QDNSDIKVVPR | 1005 | 11 | 40 | 63 | | 11961 |
| POL | DNSDIKVVPRR | 1006 | 11 | 40 | 63 | | 11962 |
| POL | NSDIKVVPRRK | 1007 | 11 | 40 | 63 | | 11963 |
| POL | ESIVIWGKTPK | 570 | 11 | 41 | 65 | | 11964 |
| POL | QIYQEPFK | 532 | 8 | 41 | 64 | 0.0013 | 11965 |
| POL | IDKAQEEII | 757 | 8 | 41 | 64 | | 11966 |
| POL | KAKIIRDY | 1017 | 8 | 41 | 64 | | 11967 |
| POL | KAKIIRDYGK | 1017 | 10 | 41 | 64 | 0.0018 | 11968 |
| POL | KISKIGPENPY | 235 | 11 | 41 | 64 | | 11969 |
| POL | KAGYVTDR | 646 | 8 | 42 | 66 | | 11970 |
| POL | ISKIGPENPY | 236 | 10 | 42 | 66 | | 11971 |
| POL | SMTKILEPFR | 352 | 10 | 42 | 66 | 0.0004 | 11972 |
| POL | SIVIWGKTPK | 571 | 10 | 42 | 66 | | 11973 |
| POL | IVIYQYMDDLY | 367 | 11 | 42 | 66 | | 11974 |
| POL | VVPRRKAKIIR | 1012 | 11 | 42 | 66 | | 11975 |
| POL | GVYYDPSK | 508 | 8 | 43 | 67 | | 11976 |
| POL | SCDKCQLK | 791 | 8 | 43 | 67 | | 11977 |
| POL | MTKILIEPFR | 353 | 9 | 43 | 67 | 0.0160 | 11978 |
| POL | IIGVYYDPSK | 507 | 9 | 43 | 67 | 0.0001 | 11979 |
| POL | ASCDKCQLK | 790 | 9 | 43 | 67 | 0.0040 | 11980 |
| POL | DSWTVNDIQK | 439 | 10 | 43 | 67 | 0.0002 | 11981 |
| POL | TFYVDGAANR | 631 | 10 | 43 | 67 | 0.0008 | 11982 |
| POL | VASCDKCQLK | 789 | 10 | 43 | 67 | 0.0004 | 11983 |
| POL | KDSWTVNDIQ | 438 | 11 | 43 | 67 | | 11984 |
| POL | ETFYVDGAAN | 630 | 11 | 43 | 67 | | 11985 |
| POL | IVASCDKCQLK | 788 | 11 | 43 | 67 | 0.1000 | 11986 |
| POL | SDIKVVPR | 1008 | 8 | 44 | 69 | | 11987 |
| POL | SDIKVVPRR | 1008 | 9 | 44 | 69 | 0.0001 | 11988 |
| POL | VDGAANRETK | 634 | 10 | 44 | 69 | | 11989 |
| POL | IGQVRDQAEH | 914 | 10 | 44 | 69 | | 11990 |
| POL | QVRDQAEHLK | 916 | 10 | 44 | 69 | 0.0093 | 11991 |
| POL | SDIKVVPRRK | 1008 | 10 | 44 | 69 | 0.0001 | 11992 |
| POL | ENREILKEPVII | 494 | 11 | 44 | 69 | | 11993 |
| POL | YVDGAANRET | 633 | 11 | 44 | 69 | | 11994 |
| POL | IIGQVRDQAEH | 913 | 11 | 44 | 69 | | 11995 |
| POL | VAKEIVASCDK | 784 | 11 | 45 | 71 | | 11996 |
| POL | GAANRETK | 636 | 8 | 45 | 70 | | 11997 |
| POL | EIVASCDK | 787 | 8 | 45 | 70 | | 11998 |
| POL | DGAANRETK | 635 | 9 | 45 | 70 | | 11999 |
| POL | PFKNLKTGKY | 537 | 10 | 45 | 70 | 0.0002 | 12000 |
| POL | PLVKLWYQLE | 613 | 11 | 45 | 70 | | 12001 |
| POL | EILKEPVH | 497 | 8 | 46 | 72 | | 12002 |
| POL | KLWYQLEK | 616 | 8 | 46 | 72 | | 12003 |
| POL | RDQAEIILK | 918 | 8 | 46 | 72 | | 12004 |
| POL | PFKNLKTGK | 537 | 9 | 46 | 72 | | 12005 |
| POL | DIQTKELQK | 959 | 9 | 46 | 72 | 0.0006 | 12006 |
| POL | LVKLWYQLEK | 614 | 10 | 46 | 72 | 0.0820 | 12007 |
| POL | KVKQWPLTEE | 207 | 11 | 46 | 72 | 0.0330 | 12008 |
| POL | VIWGKTPK | 573 | 8 | 48 | 75 | | 12009 |
| POL | QVRDQAEII | 916 | 8 | 48 | 75 | | 12010 |
| POL | DIKVVPRR | 1009 | 8 | 48 | 75 | | 12011 |
| POL | IVIWGKTPK | 572 | 9 | 48 | 75 | 0.3700 | 12012 |
| POL | DIKVVPRRK | 1009 | 9 | 48 | 75 | 0.0001 | 12013 |
| POL | KVLFLDGIDK | 750 | 10 | 48 | 75 | 0.7800 | 12014 |
| POL | KCQLKGEAMII | 794 | 10 | 48 | 75 | | 12015 |
| POL | VVESMNKELK | 902 | 10 | 48 | 75 | | 12016 |
| POL | GVVESMNKEL | 901 | 11 | 48 | 75 | | 12017 |
| POL | VVESMNKELK | 902 | 11 | 48 | 75 | | 12018 |
| POL | GVVESMNK | 901 | 8 | 49 | 77 | | 12019 |
| POL | QGVVESMNK | 900 | 9 | 49 | 77 | | 12020 |
| POL | KLKPGMDGPK | 197 | 10 | 49 | 77 | 0.0760 | 12021 |
| POL | QSQGVVESMN | 898 | 11 | 49 | 77 | | 12022 |
| POL | ESIVIWGK | 570 | 8 | 50 | 79 | | 12023 |
| POL | YVDGAANR | 633 | 8 | 50 | 78 | 0.0001 | 12024 |
| POL | LAGRWPVK | 856 | 8 | 50 | 78 | | 12025 |
| POL | KIIRDYGK | 1019 | 8 | 50 | 78 | | 12026 |
| POL | KLAGRWPVK | 855 | 9 | 50 | 78 | 0.0690 | 12027 |
| POL | QNFRVYYRDS | 973 | 11 | 50 | 78 | | 12028 |
| POL | GMDGPKVK | 201 | 8 | 51 | 80 | 0.0004 | 12029 |
| POL | KIGPENPY | 238 | 8 | 51 | 80 | | 12030 |
| POL | NNETPGIR | 325 | 8 | 51 | 80 | | 12031 |
| POL | FTTPDKKII | 403 | 8 | 51 | 80 | | 12032 |
| POL | PCIMDGPKVK | 200 | 9 | 51 | 80 | 0.0001 | 12033 |
| POL | NNETPGIRY | 325 | 9 | 51 | 80 | | 12034 |
| POL | GFTTPDKKII | 402 | 9 | 51 | 80 | | 12035 |
| POL | VLFLDGIDK | 751 | 9 | 51 | 80 | 0.0320 | 12036 |
| POL | VIYQYMDDLY | 368 | 10 | 51 | 80 | 0.0090 | 12037 |
| POL | WGFTTPDKKII | 401 | 10 | 51 | 80 | | 12038 |
| POL | FTTPDKKIIQK | 403 | 10 | 51 | 80 | 0.0150 | 12039 |
| POL | NNETPGIRYQY | 325 | 11 | 51 | 80 | | 12040 |
| POL | GFTTPDKKIIQ | 402 | 11 | 51 | 80 | | 12041 |
| POL | PAGLKKKK | 286 | 8 | 52 | 81 | | 12042 |
| POL | SDLEIGQII | 380 | 8 | 52 | 81 | | 12043 |
| POL | DLEIGQIIR | 381 | 8 | 52 | 81 | | 12044 |
| POL | WGFTTPDK | 401 | 8 | 52 | 81 | | 12045 |
| POL | GFTTPDKK | 402 | 8 | 52 | 81 | | 12046 |
| POL | KIQNFRVY | 971 | 8 | 52 | 81 | | 12047 |
| POL | VVPRRKAK | 1012 | 8 | 52 | 81 | 0.0001 | 12048 |
| POL | ETPGIRYQY | 327 | 9 | 52 | 81 | | 12049 |
| POL | GSDLEIGQII | 379 | 9 | 52 | 81 | | 12050 |
| POL | SDLEIGQIIR | 380 | 9 | 52 | 81 | 0.0001 | 12051 |
| POL | WGFTTPDKK | 401 | 9 | 52 | 81 | 0.0039 | 12052 |
| POL | KIQNFRVYY | 971 | 9 | 52 | 81 | 0.1400 | 12053 |
| POL | KVVPRRKAK | 1011 | 9 | 52 | 81 | 0.0039 | 12054 |
| POL | VGSDLEIGQH | 378 | 10 | 52 | 81 | | 12055 |
| POL | GSDLEIGQHR | 379 | 10 | 52 | 81 | | 12056 |
| POL | KIQNFRVYYR | 971 | 10 | 52 | 81 | 0.2100 | 12057 |
| POL | NFRVYYRDSR | 974 | 10 | 52 | 81 | | 12058 |
| POL | IGGIGGFIKVR | 134 | 11 | 52 | 81 | | 12059 |
| POL | VGPTPVNIIGR | 164 | 11 | 52 | 81 | | 12060 |
| POL | YVGSDLEIGQH | 377 | 11 | 52 | 81 | | 12061 |
| POL | VGSDLEIGQHR | 378 | 11 | 52 | 81 | | 12062 |
| POL | GIPIIPAGLKKK | 282 | 11 | 53 | 84 | | 12063 |
| POL | ICGFIKVR | 137 | 8 | 53 | 83 | | 12064 |
| POL | GFIKVRQY | 139 | 8 | 53 | 83 | | 12065 |
| POL | PIETVPVK | 190 | 8 | 53 | 83 | | 12066 |
| POL | ETVPVKLK | 192 | 8 | 53 | 83 | 0.0001 | 12067 |
| POL | ELELAENR | 489 | 8 | 53 | 83 | | 12068 |
| POL | QLKGEAMII | 796 | 8 | 53 | 83 | | 12069 |
| POL | ESMNKELK | 904 | 8 | 53 | 83 | | 12070 |
| POL | SMNKELKK | 905 | 8 | 53 | 83 | | 12071 |
| POL | GIGGFIKVR | 136 | 9 | 53 | 83 | 0.0005 | 12072 |
| POL | GGFIKVRQY | 138 | 9 | 53 | 83 | 0.0001 | 12073 |
| POL | ESMNKELKK | 904 | 9 | 53 | 83 | | 12074 |
| POL | GGIGGFIKVR | 135 | 10 | 53 | 83 | 0.0002 | 12075 |
| POL | IGGFIKVRQY | 137 | 10 | 53 | 83 | 0.0002 | 12076 |
| POL | ISPILTVPVK | 188 | 10 | 53 | 83 | 0.0310 | 12077 |
| POL | PIETVPVKLK | 190 | 10 | 53 | 83 | 0.0001 | 12078 |
| POL | EAELELAENR | 487 | 10 | 53 | 83 | | 12079 |
| POL | LVAVIIVASGY | 826 | 10 | 53 | 83 | | 12080 |
| POL | GIGGFIKVRQY | 136 | 11 | 53 | 83 | | 12081 |
| POL | PISPIETVPVK | 187 | 11 | 53 | 83 | | 12082 |
| POL | ILVAVIIVASGY | 825 | 11 | 53 | 83 | | 12083 |
| POL | FVNIPPLVK | 608 | 9 | 54 | 86 | 0.0660 | 12084 |
| POL | GIPIIPAGLKK | 282 | 10 | 54 | 86 | 0.1700 | 12085 |
| POL | LGIPIIPAGLKK | 281 | 11 | 54 | 86 | | 12086 |
| POL | QNFRVYYR | 973 | 8 | 54 | 84 | | 12087 |
| POL | PTPVNIIGR | 166 | 9 | 54 | 84 | 0.0001 | 12088 |
| POL | LAENREILK | 492 | 9 | 54 | 84 | 0.0003 | 12089 |
| POL | ELAENREILK | 491 | 10 | 54 | 84 | 0.0003 | 12090 |
| POL | EFVNTPPLVK | 607 | 10 | 54 | 84 | | 12091 |
| POL | PLTEEKIK | 212 | 8 | 55 | 86 | | 12092 |
| POL | LFLDGIDK | 752 | 8 | 55 | 86 | | 12093 |
| POL | GIPIIPAGLK | 282 | 9 | 56 | 89 | 0.0650 | 12094 |
| POL | LGIPIIPAGLK | 281 | 10 | 56 | 89 | 0.0150 | 12095 |
| POL | QLGIPHPAGLK | 280 | 11 | 56 | 89 | | 12096 |
| POL | VTVLDVGDAY | 295 | 10 | 56 | 88 | 0.0004 | 12097 |
| POL | ELKKIIGQVR | 909 | 10 | 56 | 88 | | 12098 |
| POL | DFWEVQLGIPII | 275 | 11 | 56 | 88 | | 12099 |
| POL | SVTVLDVGDA | 294 | 11 | 56 | 88 | | 12100 |
| POL | KTAVQMAVFI | 925 | 11 | 56 | 88 | | 12101 |
| POL | VNTPPLVK | 609 | 8 | 57 | 89 | | 12102 |
| POL | AIKKKDSTK | 251 | 9 | 57 | 89 | 0.0086 | 12103 |
| POL | TVLDVGDAY | 296 | 9 | 57 | 89 | 0.0056 | 12104 |
| POL | TTPDKKHQK | 404 | 9 | 57 | 89 | 0.0042 | 12105 |
| POL | FAIKKKDSTK | 250 | 10 | 57 | 89 | 0.0002 | 12106 |
| POL | NTPPLVKLWY | 610 | 10 | 57 | 89 | 0.0002 | 12107 |
| POL | AIKKKDSTKW | 251 | 11 | 57 | 89 | | 12108 |
| POL | VNTPPLVKLW | 609 | 11 | 57 | 89 | | 12109 |
| POL | MAVFIHNPKR | 930 | 11 | 57 | 89 | | 12110 |
| POL | GGIGGYSAGER | 941 | 11 | 57 | 89 | | 12111 |
| POL | KDSTKWRK | 255 | 8 | 58 | 91 | | 12112 |
| POL | EVQLGIPH | 278 | 8 | 58 | 91 | | 12113 |
| POL | GGNEQVDK | 735 | 8 | 58 | 91 | | 12114 |
| POL | FIHINFKRK | 933 | 8 | 58 | 91 | | 12115 |
| POL | GGYSAGER | 944 | 8 | 58 | 91 | | 12116 |
| POL | RVYYRDSR | 976 | 8 | 58 | 91 | | 12117 |
| POL | IGGNEQVDK | 734 | 9 | 58 | 91 | 0.0001 | 12118 |
| POL | VFIHNFKRK | 932 | 9 | 58 | 91 | 0.0003 | 12119 |
| POL | IGGYSAGER | 943 | 9 | 58 | 91 | 0.0001 | 12120 |
| POL | GIGGNEQVDK | 733 | 10 | 58 | 91 | 0.0001 | 12121 |
| POL | PAETGQETAY | 842 | 10 | 58 | 91 | | 12122 |
| POL | AVFIHNFKRK | 931 | 10 | 58 | 91 | 0.8500 | 12123 |
| POL | GIGGYSAGER | 942 | 10 | 58 | 91 | 0.0001 | 12124 |
| POL | STKWRKLVDF | 257 | 11 | 58 | 91 | | 12125 |
| POL | KGIGGNEQVDK | 732 | 11 | 58 | 91 | | 12126 |
| POL | AVFIVASGY | 828 | 8 | 59 | 92 | | 12127 |
| POL | ETGQETAY | 844 | 8 | 59 | 92 | | 12128 |
| POL | GIWQLDCTII | 811 | 9 | 59 | 92 | | 12129 |
| POL | VAVIIVASGY | 827 | 9 | 59 | 92 | 0.0001 | 12130 |
| POL | KGPAKLLWK | 988 | 9 | 59 | 92 | 0.0007 | 12131 |
| POL | EVNIVTDSQY | 684 | 10 | 59 | 92 | | 12132 |
| POL | PGIWQLDCTII | 810 | 10 | 59 | 92 | | 12133 |
| POL | TAVQMAVFIII | 926 | 10 | 59 | 92 | 0.0110 | 12134 |
| POL | VGKLNWASQI | 450 | 11 | 59 | 92 | | 12135 |
| POL | NFKRKGGIGGY | 936 | 11 | 59 | 92 | | 12136 |
| POL | QLDCTIILEGK | 814 | 10 | 60 | 95 | 0.0003 | 12137 |
| POL | DFRELNKR | 265 | 8 | 60 | 94 | | 12138 |
| POL | VLDVGDAY | 297 | 8 | 60 | 94 | | 12139 |
| POL | KNLKTGKY | 539 | 8 | 60 | 94 | | 12140 |
| POL | VDFRLLNKR | 264 | 9 | 60 | 94 | | 12141 |
| POL | MOVELIIPDK | 419 | 9 | 60 | 94 | 0.0960 | 12142 |
| POL | KLNWASQIY | 452 | 9 | 60 | 94 | 0.0006 | 12143 |
| POL | AVQMAVFIH | 927 | 9 | 60 | 94 | | 12144 |
| POL | MAVFIHNFK | 930 | 9 | 60 | 94 | 0.3000 | 12145 |
| POL | LVDFRELNKR | 263 | 10 | 60 | 94 | | 12146 |
| POL | WMGYELIIPDK | 418 | 10 | 60 | 94 | 0.0004 | 12147 |
| POL | QMAVFIIINFK | 929 | 10 | 60 | 94 | 0.6400 | 12148 |
| POL | MAVFIHNFKR | 930 | 10 | 60 | 94 | 0.0083 | 12149 |
| POL | KLVDFRELNK | 262 | 11 | 60 | 94 | | 12150 |
| POL | QMAVFIHNFK | 929 | 11 | 60 | 94 | | 12151 |
| POL | LNWASQIY | 453 | 8 | 61 | 95 | | 12152 |
| POL | NDIQKLVGK | 444 | 9 | 61 | 95 | | 12153 |
| POL | LDCTHLEGK | 815 | 9 | 61 | 95 | | 12154 |
| POL | VNDIQKLVGK | 443 | 10 | 61 | 95 | | 12155 |
| POL | TVNDIQKLVGK | 442 | 11 | 61 | 95 | 0.1700 | 12156 |
| POL | VDFRELNK | 264 | 8 | 62 | 97 | | 12157 |
| POL | WTVNDIQK | 441 | 8 | 62 | 97 | 0.0001 | 12158 |
| POL | DIQKLVGK | 445 | 8 | 62 | 97 | | 12159 |
| POL | NIVTDSQY | 686 | 8 | 62 | 97 | | 12160 |
| POL | DCTIILEGK | 816 | 8 | 62 | 97 | | 12161 |
| POL | AVFIIINFK | 931 | 8 | 62 | 97 | 0.0380 | 12162 |
| POL | VFIIINFKR | 932 | 8 | 62 | 97 | | 12163 |
| POL | LVDFRELNK | 263 | 9 | 62 | 97 | 0.0300 | 12164 |
| POL | VNIVIDSQY | 685 | 9 | 62 | 97 | | 12165 |
| POL | AVFIIINFKR | 931 | 9 | 62 | 97 | 1.8000 | 12166 |
| POL | MIGGIGGFIK | 133 | 10 | 62 | 97 | 0.0550 | 12167 |
| POL | KLVDFRELNK | 262 | 10 | 62 | 97 | 0.0900 | 12168 |
| POL | KMIGGIGGFIK | 132 | 11 | 62 | 97 | 0.7000 | 12169 |
| POL | NVLPQGWK | 336 | 8 | 63 | 100 | 0.0012 | 12170 |
| POL | IGGIGGFIK | 134 | 9 | 63 | 98 | 0.0037 | 12171 |
| POL | YNVLPQGWK | 335 | 9 | 63 | 98 | 0.0001 | 12172 |
| POL | GGIGGFIK | 135 | 8 | 64 | 100 | | 12173 |
| POL | FLWMGYELII | 416 | 9 | 64 | 100 | | 12174 |
| POL | PFLWMGYELII | 415 | 10 | 64 | 100 | | 12175 |
| REV | GTRQTRKNR | 37 | 9 | 01 | 50 | | 12176 |
| REV | TTRQARRNR | 37 | 9 | 01 | 50 | | 12177 |
| REV | GTRQTRKNRR | 37 | 10 | 01 | 50 | | 12178 |
| REV | TTRQARRNRR | 37 | 10 | 01 | 50 | | 12179 |
| REV | GTRQTRKNRR | 37 | 11 | 01 | 50 | | 12180 |
| REV | TTRQARRNRR | 37 | 11 | 01 | 50 | | 12181 |
| REV | GTETGVGR | 103 | 8 | 06 | 19 | | 12182 |
| REV | QGTETGVGR | 102 | 9 | 06 | 19 | | 12183 |
| REV | LLKTVRLIK | 12 | 9 | 10 | 16 | | 12184 |
| REV | GDSDEELLK | 6 | 9 | 11 | 17 | | 12185 |
| REV | PLQLPPIER | 76 | 9 | 11 | 17 | | 12186 |
| REV | SGDSDEELLK | 5 | 10 | 11 | 17 | | 12187 |
| REV | RSGDSDEELLK | 4 | 11 | 11 | 17 | | 12188 |
| REV | PVPLQLPPIER | 74 | 11 | 11 | 17 | | 12189 |
| REV | RARQRQIR | 50 | 8 | 12 | 19 | | 121911 |
| REV | DSDEELLK | 7 | 8 | 12 | 19 | | 12191 |
| REV | ILSTCLGR | 63 | 8 | 12 | 19 | | 12192 |
| REV | RILSTCLGR | 62 | 9 | 12 | 19 | | 12193 |
| REV | SNPPPSPEGTR | 27 | 11 | 12 | 19 | | 12194 |
| REV | AVRIIKILY | 17 | 9 | 13 | 20 | | 12195 |
| REV | QLPPLERLH | 78 | 9 | 13 | 20 | | 12196 |
| REV | PSPEGTRQAR | 31 | 10 | 13 | 20 | | 12197 |
| REV | RNRRRRWRER | 43 | 10 | 13 | 20 | | 12198 |
| REV | PSPEGTRQAR | 31 | 11 | 13 | 20 | | 12199 |
| REV | PLQLPPLERLH | 76 | 11 | 13 | 20 | | 12200 |
| REV | GTRQARKNRR | 36 | 11 | 14 | 22 | | 12201 |
| REV | RARQRQIII | 50 | 8 | 15 | 24 | | 12202 |
| REV | GTRQARKNR | 36 | 9 | 15 | 23 | | 12203 |
| REV | GTRQARKNRR | 36 | 10 | 15 | 23 | | 12204 |
| REV | QARKNRRRR | 40 | 9 | 16 | 25 | | 12205 |
| REV | QARKNRRRR | 40 | 11 | 16 | 25 | | 12206 |
| REV | QARKNRRR | 40 | 8 | 17 | 27 | | 12207 |
| REV | IIKILYQSNPY | 20 | 11 | 18 | 28 | | 12208 |
| REV | KNRRRRWRA | 43 | 10 | 19 | 30 | | 12209 |
| REV | KNRRRRWR | 43 | 8 | 21 | 33 | | 12210 |
| REV | RNRRRRWRA | 43 | 10 | 23 | 36 | | 12211 |
| REV | KILYQSNPY | 22 | 9 | 26 | 41 | | 12212 |
| REV | ILYQSNPY | 23 | 8 | 27 | 42 | | 12213 |
| REV | EGTRQARR | 35 | 8 | 27 | 42 | | 12214 |
| REV | EGTRQARRNR | 35 | 10 | 27 | 42 | | 12215 |
| REV | EGTRQARRNR | 35 | 11 | 27 | 42 | | 12216 |
| REV | GTRQARRNR | 36 | 9 | 34 | 53 | | 12217 |
| REV | GTRQARRNRR | 36 | 10 | 34 | 53 | | 12218 |
| REV | GTRQARRNRR | 36 | 11 | 34 | 53 | | 12219 |
| REV | PVPLQLPPLER | 74 | 11 | 34 | 53 | | 12220 |
| REV | PLQLPPLER | 76 | 9 | 35 | 55 | | 12221 |
| REV | QARRNRRRR | 40 | 11 | 37 | 58 | | 12222 |
| REV | QARRNRRR | 40 | 8 | 38 | 59 | | 12223 |
| REV | QARRNRRRR | 40 | 9 | 38 | 59 | | 12224 |
| REV | RNRRRRWR | 43 | 8 | 40 | 63 | | 12225 |
| TAT | PCGYPRRK | 104 | 8 | 01 | 50 | | 12226 |
| TAT | AGPGGYPRR | 102 | 9 | 01 | 50 | | 12227 |
| TAT | TGPSGQPCII | 102 | 9 | 01 | 50 | | 12228 |
| TAT | ETGIPSGQPCII | 101 | 10 | 01 | 50 | | 12229 |
| TAT | KAGPGGYPRR | 101 | 10 | 01 | 50 | | 12230 |
| TAT | AGPGGYPRRK | 102 | 10 | 01 | 50 | | 12231 |
| TAT | KAGPGGYPRR | 101 | 11 | 01 | 50 | | 12232 |
| TAT | GGYPRRKGSC | 105 | 11 | 01 | 50 | | 12233 |
| TAT | ACTNCYCK | 24 | 8 | 10 | 16 | | 12234 |
| TAT | TACTNCYCK | 23 | 9 | 10 | 16 | | 12235 |
| TAT | CNNCYCKK | 25 | 8 | 11 | 17 | | 12236 |
| TAT | YCKKCCFII | 29 | 8 | 11 | 17 | | 12237 |
| TAT | YCKKCCYH | 29 | 8 | 11 | 17 | | 12238 |
| TAT | VDPRLEPWK | 4 | 9 | 11 | 17 | | 12239 |
| TAT | ACNNCYCKK | 24 | 9 | 11 | 17 | | 12240 |
| TAT | PVDPRLEPWK | 3 | 10 | 11 | 17 | 0.0001 | 12241 |
| TAT | VDPRLEPWKH | 4 | 10 | 11 | 17 | | 12242 |
| TAT | TACNNCYCKK | 23 | 10 | 11 | 17 | | 12243 |
| TAT | PVDPRLEPWK | 3 | 11 | 11 | 17 | | 12244 |
| TAT | RGDPTGPKES | 84 | 11 | 11 | 17 | | 12245 |
| TAT | GDPTGPKESK | 85 | 11 | 11 | 17 | | 12246 |
| TAT | ESKKKVESK | 93 | 9 | 12 | 19 | | 12247 |
| TAT | GDPTGPKESK | 85 | 10 | 12 | 19 | | 12248 |
| TAT | PTGPKESKKK | 88 | 10 | 12 | 19 | | 12249 |
| TAT | TGPKESKKK | 89 | 9 | 13 | 20 | | 12250 |
| TAT | LNKGLGISY | 42 | 9 | 14 | 22 | | 12251 |
| TAT | FLNKGLGISY | 41 | 10 | 14 | 22 | | 12252 |
| TAT | PVDPNLEPWN | 3 | 11 | 14 | 22 | | 12253 |
| TAT | CFLNKGLGISY | 40 | 11 | 14 | 22 | | 12254 |
| TAT | LNKGLGISYGR | 42 | 11 | 14 | 22 | | 12255 |
| TAT | WNHPGSQPK | 14 | 9 | 15 | 23 | | 12256 |
| TAT | RGDPTGPK | 84 | 8 | 16 | 25 | | 12257 |
| TAT | VDPNLEPWNH | 4 | 10 | 16 | 25 | | 12258 |
| TAT | PNLEPWNH | 9 | 8 | 17 | 27 | | 12259 |
| TAT | ACNNCYCK | 24 | 8 | 17 | 27 | | 12260 |
| TAT | TACNNCYCK | 23 | 9 | 17 | 27 | | 12261 |
| TAT | PTGPKESKK | 88 | 9 | 18 | 28 | | 12262 |
| TAT | TGPKESKK | 89 | 8 | 19 | 30 | | 12263 |
| TAT | PTGPKESK | 88 | 8 | 20 | 31 | | 12264 |
| TAT | YGRKKRRQRR | 50 | 11 | 22 | 34 | | 12265 |
| TAT | YGRKKRRQRR | 50 | 10 | 38 | 59 | | 12266 |
| TAT | ISYGRKKRRQR | 48 | 11 | 39 | 61 | | 12267 |
| TAT | YGRKKRRQR | 50 | 9 | 41 | 64 | | 12268 |
| TAT | GISYGRKKRR | 47 | 10 | 45 | 70 | 0.0001 | 12269 |
| TAT | LGISYGRKKRR | 46 | 11 | 45 | 70 | | 12270 |
| TAT | ISYGRKKRR | 48 | 9 | 46 | 72 | 0.0005 | 12271 |
| TAT | GLGISYGRKKR | 45 | 11 | 54 | 86 | | 12272 |
| TAT | GLGISYGR | 45 | 8 | 55 | 87 | | 12273 |
| TAT | GLGISYGRK | 45 | 9 | 55 | 87 | 0.0006 | 12274 |
| TAT | GLGISYGRKK | 45 | 10 | 55 | 87 | | 12275 |
| TAT | KGLGISYGR | 44 | 9 | 55 | 86 | 0.0180 | 12276 |
| TAT | KGLGISYGRK | 44 | 10 | 55 | 86 | 0.0007 | 12277 |
| TAT | KGLGISYGRKK | 44 | 11 | 55 | 86 | | 12278 |
| TAT | GISYGRKKR | 47 | 9 | 57 | 89 | 0.0005 | 12279 |
| TAT | LGISYGRKKR | 46 | 10 | 57 | 89 | | 12280 |
| TAT | LGISYGRK | 46 | 8 | 58 | 91 | | 12281 |
| TAT | GISYGRKK | 47 | 8 | 58 | 91 | | 12282 |
| TAT | ISYGRKKR | 48 | 8 | 58 | 91 | | 12283 |
| TAT | LGISYGRKK | 46 | 9 | 58 | 91 | 0.0005 | 12284 |
| VIF | LIVWQVDR | 8 | 8 | 10 | 16 | | 12285 |
| VIF | RMRINTWK | 15 | 8 | 10 | 16 | | 12286 |
| VIF | LIKPKKIK | 158 | 8 | 10 | 16 | | 12287 |
| VIF | KGWPYRIIIIY | 36 | 9 | 10 | 16 | | 12288 |
| VIF | ALIKPKKIK | 157 | 9 | 10 | 16 | | 12289 |
| VIF | VDRMRINTWK | 13 | 10 | 10 | 16 | | 12290 |
| VIF | GVSIEWRLRR | 87 | 10 | 10 | 16 | | 12291 |
| VIF | QVDRMRINTW | 12 | 11 | 10 | 16 | | 12292 |
| VIF | RLVITTYWGL | 65 | 11 | 10 | 16 | | 12293 |
| VIF | QTGERDWIILG | 75 | 11 | 10 | 16 | | 12294 |
| VIF | GVSIEWRLRR | 87 | 11 | 10 | 16 | | 12295 |
| VIF | IDPDLADQLIII | 103 | 11 | 10 | 16 | | 12296 |
| VIF | LVEDRWNKPQ | 178 | 11 | 10 | 16 | | 12297 |
| VIF | SIEWRLRR | 89 | 8 | 11 | 17 | | 12298 |
| VIF | TALIKPKK | 156 | 8 | 11 | 17 | | 12299 |
| VIF | LVEDRWNK | 178 | 8 | 11 | 17 | | 12300 |
| VIF | VSIEWRLRR | 88 | 9 | 11 | 17 | | 12301 |
| VIF | SIEWRLRRY | 89 | 9 | 11 | 17 | | 12302 |
| VIF | LTALIKPKK | 155 | 9 | 11 | 17 | | 12303 |
| VIF | KLVEDRWNK | 177 | 9 | 11 | 17 | | 12304 |
| VIF | VSIEWRLRRY | 88 | 10 | 11 | 17 | | 12305 |
| VIF | GLADQLIHMH | 106 | 10 | 11 | 17 | | 12306 |
| VIF | ALTALIKPKK | 134 | 10 | 11 | 17 | | 12307 |
| VIF | WNKPQKTRGH | 183 | 10 | 11 | 17 | | 12308 |
| VIF | PGLADQLIHMH | 105 | 11 | 11 | 17 | | 12309 |
| VIF | GLADQLIHMH | 106 | 11 | 11 | 17 | | 12310 |
| VIF | LALTALIKPKK | 153 | 11 | 11 | 17 | | 12311 |
| VIF | WNKPQKTRGH | 183 | 11 | 11 | 17 | | 12312 |
| VIF | WPYRIIIIYESR | 38 | 11 | 12 | 19 | | 12313 |
| VIF | KGWFYRIIII | 36 | 8 | 12 | 19 | | 12314 |
| VIF | WGLQIGER | 72 | 8 | 12 | 19 | | 12315 |
| VIF | QTGERDWII | 75 | 8 | 12 | 19 | | 12316 |
| VIF | IVWQVDRMK | 9 | 9 | 12 | 19 | | 12317 |
| VIF | KIRTWNSLVK | 17 | 10 | 12 | 19 | | 12318 |
| VIF | LVKIIHMYVSK | 24 | 10 | 12 | 19 | | 12319 |
| VIF | GLQTGERDWH | 73 | 10 | 12 | 19 | | 12320 |
| VIF | TGERDWHLGH | 77 | 10 | 12 | 19 | | 12321 |
| VIF | HGVSIEWRLR | 86 | 10 | 12 | 19 | | 12322 |
| VIF | IVWQVDRMKI | 9 | 11 | 12 | 19 | | 12323 |
| VIF | KIRTWNSLVK | 17 | 11 | 12 | 19 | | 12324 |
| VIF | SLVKIIHMYVS | 23 | 11 | 12 | 19 | | 12325 |
| VIF | LVKHIIMYVSK | 24 | 11 | 12 | 19 | | 12326 |
| VIF | WGLQTGERD | 72 | 11 | 12 | 19 | | 12327 |
| VIF | WPYRIIIIYESR | 38 | 10 | 13 | 21 | | 12328 |
| VIF | QVDRMKIR | 12 | 8 | 13 | 20 | | 12329 |
| VIF | HIPLGDAR | 56 | 8 | 13 | 20 | | 12330 |
| VIF | ADQLIIIMII | 108 | 8 | 13 | 20 | | 12331 |
| VIF | CFSDSAIR | 119 | 8 | 13 | 20 | | 12332 |
| VIF | FSDSAIRK | 120 | 8 | 13 | 20 | | 12333 |
| VIF | SLQYLALK | 149 | 8 | 13 | 20 | | 12334 |
| VIF | LTALIKPK | 155 | 8 | 13 | 20 | | 12335 |
| VIF | LADQLIIIMH | 107 | 9 | 13 | 20 | | 12336 |
| VIF | ADQLIIIMHY | 108 | 9 | 13 | 20 | | 12337 |
| VIF | CFSDSAIRK | 119 | 9 | 13 | 20 | | 12338 |
| VIF | GSLQYLALK | 148 | 9 | 13 | 20 | | 12339 |
| VIF | ALTALIKPK | 154 | 9 | 13 | 20 | | 12340 |
| VIF | SVKKLTEDR | 174 | 9 | 13 | 20 | | 12341 |
| VIF | EVHIPLGDAR | 54 | 10 | 13 | 20 | | 12342 |
| VIF | LADQLIIIMHY | 107 | 10 | 13 | 20 | | 12343 |
| VIF | DCFSESAIRK | 118 | 10 | 13 | 20 | | 12344 |
| VIF | VGSLQYLALK | 147 | 10 | 13 | 20 | | 12345 |
| VIF | LALTALIKPK | 153 | 10 | 13 | 20 | | 12346 |
| VIF | PSVKKLTEDR | 173 | 10 | 13 | 20 | | 12347 |
| VIF | FDCFSESAIRK | 117 | 11 | 13 | 20 | | 12348 |
| VIF | YLALTALIKPK | 152 | 11 | 13 | 20 | | 12349 |
| VIF | FSESAIRK | 120 | 8 | 14 | 22 | | 12350 |
| VIF | IVSPRCEY | 133 | 8 | 14 | 22 | | 12351 |
| VIF | GVSIEWRLR | 87 | 9 | 14 | 22 | | 12352 |
| VIF | ADQLIIILYY | 108 | 9 | 14 | 22 | | 12353 |
| VIF | CFSESAIRK | 119 | 9 | 14 | 22 | | 12354 |
| VIF | VDRMRIRTWK | 13 | 10 | 14 | 22 | | 12355 |
| VIF | LADQLIHLYY | 107 | 10 | 14 | 22 | | 12356 |
| VIF | RCDYQAGHNK | 137 | 10 | 14 | 22 | | 12357 |
| VIF | QVDRMRIRTW | 12 | 11 | 14 | 22 | | 12358 |
| VIF | RIRTWNSLVK | 17 | 11 | 14 | 22 | | 12359 |
| VIF | RMRIRTWK | 15 | 8 | 15 | 23 | | 12360 |
| VIF | RTWKSLVK | 19 | 8 | 15 | 23 | | 12361 |
| VIF | VSIEWRLR | 88 | 8 | 15 | 23 | | 12362 |
| VIF | ADQLIIILY | 108 | 8 | 15 | 23 | | 12363 |
| VIF | RTWKSLVKH | 19 | 9 | 15 | 23 | | 12364 |
| VIF | QGVSIEWRK | 86 | 9 | 15 | 23 | | 12365 |
| VIF | LADQLIHLY | 107 | 9 | 15 | 23 | | 12366 |
| VIF | AIRKAILGII | 124 | 9 | 15 | 23 | | 12367 |
| VIF | CDYQAGHNK | 138 | 9 | 15 | 23 | | 12368 |
| VIF | RIRTWKSLVK | 17 | 10 | 15 | 23 | | 12369 |
| VIF | RIRTWNSLVK | 17 | 10 | 15 | 23 | | 12370 |
| VIF | RTWKSLVKHH | 19 | 10 | 15 | 23 | | 12371 |
| VIF | SAIRKAILGH | 123 | 10 | 15 | 23 | | 12372 |
| VIF | RIRTWKSLVK | 17 | 11 | 15 | 23 | | 12373 |
| VIF | LGQGVSIEWR | 84 | 11 | 15 | 23 | | 12374 |
| VIF | VDPGLADQLIH | 103 | 11 | 15 | 23 | | 12375 |
| VIF | ITTYWGLII | 68 | 8 | 16 | 25 | | 12376 |
| VIF | GVSIEWRK | 87 | 8 | 16 | 25 | | 12377 |
| VIF | RCDYQAGII | 137 | 8 | 16 | 25 | | 12378 |
| VIF | LALIALIK | 153 | 8 | 16 | 25 | | 12379 |
| VIF | VITTYWGLH | 67 | 9 | 16 | 25 | | 12380 |
| VIF | YLALTALIK | 152 | 9 | 16 | 25 | | 12381 |
| VIF | KTKGIIRGSII | 188 | 9 | 16 | 25 | 0.0001 | 12382 |
| VIF | LVITTYWGLII | 66 | 10 | 16 | 25 | | 12383 |
| VIF | WNKPQKTKGII | 183 | 10 | 16 | 25 | | 12384 |
| VIF | WNKPQKTKGH | 183 | 11 | 16 | 25 | | 12385 |
| VIF | EDRWNKPQKT | 180 | 11 | 17 | 27 | | 12386 |
| VIF | WNKPQKTK | 183 | 8 | 18 | 28 | | 12387 |
| VIF | KSLVKIIHMY | 22 | 9 | 18 | 28 | | 12388 |
| VIF | EDRWNKPQKT | 180 | 11 | 18 | 28 | | 12389 |
| VIF | RCEYQAGIINK | 137 | 10 | 19 | 30 | | 12390 |
| VIF | HIPLGEAR | 56 | 8 | 20 | 31 | | 12391 |
| VIF | WNKPQKTR | 183 | 8 | 20 | 31 | | 12392 |
| VIF | EVIIIPLGEAR | 54 | 10 | 20 | 31 | | 12393 |
| VIF | IITGERDWII | 75 | 8 | 21 | 33 | | 12394 |
| VIF | DLADQLIH | 106 | 8 | 21 | 33 | | 12395 |
| VIF | PDLADQLIH | 105 | 9 | 21 | 33 | | 12396 |
| VIF | GLIITGERDWII | 73 | 10 | 21 | 33 | | 12397 |
| VIF | WGLIITGERD | 72 | 11 | 21 | 33 | | 12398 |
| VIF | VSPRCEYQAG | 134 | 11 | 21 | 33 | | 12399 |
| VIF | LTEDRWNKPQ | 178 | 11 | 21 | 33 | 0.0130 | 12400 |
| VIF | GSHTMNGII | 194 | 8 | 22 | 34 | | 12401 |
| VIF | RGSHTMNGH | 193 | 9 | 22 | 34 | | 12402 |
| VIF | TTYWGLHTGE | 69 | 11 | 22 | 34 | | 12403 |
| VIF | HLGHGVSIEW | 83 | 11 | 22 | 34 | | 12404 |
| VIF | NSLVKIIHMY | 22 | 9 | 24 | 38 | | 12405 |
| VIF | WNSLVKHHM | 21 | 10 | 24 | 38 | | 12406 |
| VIF | QGVSIEWR | 86 | 8 | 25 | 39 | | 12407 |
| VIF | LGQGVSIEWR | 84 | 10 | 25 | 39 | | 12408 |
| VIF | HLGQGVSIEW | 83 | 11 | 25 | 39 | | 12409 |
| VIF | RCEYQAGH | 137 | 8 | 26 | 41 | | 12410 |
| VIF | RTWNSLVKH | 19 | 9 | 26 | 41 | | 12411 |
| VIF | RTWNSLVKHH | 19 | 10 | 26 | 41 | | 12412 |
| VIF | RTWNSLVK | 19 | 8 | 27 | 42 | | 12413 |
| VIF | IIGVSIEWR | 86 | 8 | 27 | 42 | | 12414 |
| VIF | GLADQLIH | 106 | 8 | 27 | 42 | | 12415 |
| VIF | PGLADQLIH | 105 | 9 | 27 | 42 | | 12416 |
| VIF | LGHGVSIEWR | 84 | 10 | 27 | 42 | | 12417 |
| VIF | YPDCPSESAIR | 116 | 11 | 27 | 42 | | 12418 |
| VIF | WGLIITGER | 72 | 8 | 28 | 44 | | 12419 |
| VIF | DCPSESAIR | 118 | 9 | 28 | 44 | | 12420 |
| VIF | FDCFSESAIR | 117 | 10 | 28 | 44 | | 12421 |
| VIF | WNSLVKIIII | 21 | 8 | 29 | 45 | | 12422 |
| VIF | CPSESAIR | 119 | 8 | 29 | 45 | | 12423 |
| VIF | KLTEDRWNK | 177 | 9 | 29 | 45 | 0.2700 | 12424 |
| VIF | LTEDRWNK | 178 | 8 | 31 | 48 | 0.0045 | 12425 |
| VIF | IVWQVDRMRI | 9 | 11 | 33 | 52 | | 12426 |
| VIF | QVDRMRIR | 12 | 8 | 34 | 53 | | 12427 |
| VIF | EDRWNKPQK | 180 | 9 | 39 | 61 | | 12428 |
| VIF | VMIVWQVDR | 7 | 11 | 41 | 64 | | 12429 |
| VIF | QVMIVWQVDR | 6 | 10 | 43 | 67 | | 12430 |
| VIF | MIVWQVDRM | 8 | 10 | 43 | 67 | 0.0001 | 12431 |
| VIF | AGIINKVGSLQ | 142 | 11 | 43 | 67 | | 12432 |
| VIF | SLVKIIIIMY | 23 | 8 | 44 | 69 | | 12433 |
| VIF | VMIVWQVDR | 7 | 9 | 44 | 69 | 0.0220 | 12434 |
| VIF | MIVWQVDR | 8 | 8 | 46 | 72 | | 12435 |
| VIF | IVWQVDRMR | 9 | 9 | 47 | 73 | 0.0007 | 12436 |
| VIF | IINKVGSLQY | 144 | 9 | 47 | 73 | | 12437 |
| VPR | #LPGRRGR | 85 | 8 | 01 | 50 | | 12438 |
| VPR | NIRGRRVR | 85 | 8 | 01 | 50 | | 12439 |
| VPR | WALELLEELK | 18 | 10 | 09 | 15 | | 12440 |
| VPR | QLLPVHFR | 66 | 8 | 10 | 16 | | 12441 |
| VPR | HSRIGIIR | 79 | 8 | 10 | 16 | | 12442 |
| VPR | RIGITRQR | 81 | 8 | 10 | 16 | | 12443 |
| VPR | IGITRQRR | 82 | 8 | 10 | 16 | | 12444 |
| VPR | ALELLEELK | 19 | 9 | 10 | 16 | | 12445 |
| VPR | RIGITRQRR | 81 | 9 | 10 | 16 | | 12446 |
| VPR | HSRIGITRQR | 79 | 10 | 10 | 16 | | 12447 |
| VPR | HSRIGITRQRR | 79 | 11 | 10 | 16 | | 12448 |
| VPR | WLHGLGQY | 38 | 8 | 11 | 17 | | 12449 |
| VPR | HFRIGCRH | 71 | 8 | 11 | 17 | | 12450 |
| VPR | HSRIGITR | 79 | 8 | 11 | 17 | | 12451 |
| VPR | FIHFRIGCR | 69 | 9 | 11 | 17 | | 12452 |
| VPR | LFIHFRIGCR | 68 | 10 | 11 | 17 | | 12453 |
| VPR | FIHFRIGCRH | 69 | 10 | 11 | 17 | | 12454 |
| VPR | FVHFRIGCQH | 69 | 10 | 11 | 17 | | 12453 |
| VPR | HFRIGCRHSR | 71 | 10 | 11 | 17 | | 12456 |
| VPR | LLFIHFRIGCR | 67 | 11 | 11 | 17 | | 12457 |
| VPR | LFIHFRIGCRH | 68 | 11 | 11 | 17 | | 12458 |
| VPR | LFVIIFRIGCQII | 68 | 11 | 11 | 17 | | 12459 |
| VPR | RIGCRIISR | 74 | 8 | 12 | 19 | | 12460 |
| VPR | LGQIIIYNTY | 42 | 9 | 13 | 20 | | 12461 |
| VPR | LGQYIYETY | 42 | 9 | 13 | 20 | | 12462 |
| VPR | IIFPRIWLII | 33 | 8 | 14 | 22 | | 12463 |
| VPR | KSEAVRHFPR | 27 | 10 | 14 | 22 | | 12464 |
| VPR | AVRIIFPRIWL | 30 | 11 | 14 | 22 | | 12465 |
| VPR | ELKSEAVR | 25 | 8 | 16 | 25 | | 12466 |
| VPR | AGVEAIIR | 55 | 8 | 16 | 25 | | 12467 |
| VPR | ELKSEAVRH | 25 | 9 | 16 | 25 | | 12468 |
| VPR | WAGVEAIIR | 54 | 9 | 16 | 25 | | 12469 |
| VPR | LLEELKSEAVR | 22 | 11 | 16 | 25 | | 12470 |
| VPR | DTWAGVEAIIR | 52 | 11 | 16 | 25 | | 12471 |
| VPR | ELKNEAVR | 25 | 8 | 17 | 27 | | 12472 |
| VPR | ELKNEAVRH | 25 | 9 | 17 | 27 | | 12473 |
| VPR | LGQIIIYETY | 42 | 9 | 17 | 27 | | 12474 |
| VPR | LLEELKNEAVR | 22 | 11 | 17 | 27 | | 12475 |
| VPR | EGVEAIIR | 55 | 8 | 18 | 28 | | 12476 |
| VPR | DTWEGVEAIIR | 52 | 11 | 18 | 28 | | 12477 |
| VPR | RARNGASR | 93 | 8 | 19 | 30 | | 12478 |
| VPR | KNEAVRIIFPR | 27 | 10 | 19 | 30 | | 12479 |
| VPR | WLIIGLGQH | 38 | 8 | 20 | 31 | | 12480 |
| VPR | HGLGQIIIY | 40 | 8 | 20 | 31 | | 12481 |
| VPR | WLHGLGQIIIY | 38 | 10 | 20 | 31 | | 12482 |
| VPR | LFIIIFRIGCQH | 68 | 11 | 29 | 45 | | 12483 |
| VPR | FIIIFRIGCQH | 69 | 10 | 30 | 47 | | 12484 |
| VPR | IIFPRPWLH | 33 | 8 | 31 | 49 | | 12485 |
| VPR | AVRHFPRPWL | 30 | 11 | 31 | 48 | | 12486 |
| VPR | ILQQLLFIHFR | 63 | 11 | 35 | 55 | | 12487 |
| VPR | RILQQLLFIIH | 62 | 10 | 36 | 56 | | 12488 |
| VPR | ILQQLLFIH | 63 | 9 | 37 | 58 | | 12489 |
| VPR | EDQGPQREPY | 6 | 10 | 37 | 58 | | 12490 |
| VPR | QAPEDQGPQR | 3 | 10 | 39 | 62 | | 12491 |
| VPR | WTLELLEELK | 18 | 10 | 42 | 69 | | 12492 |
| VPR | QGPQREPY | 8 | 8 | 43 | 68 | | 12493 |
| VPR | QLLFIHFR | 66 | 8 | 44 | 69 | | 12494 |
| VPR | FIFRIGCQII | 71 | 8 | 44 | 69 | | 12495 |
| VPR | TLELLEELK | 19 | 9 | 44 | 69 | | 12496 |
| VPR | IIFRIGCQHSR | 71 | 10 | 44 | 69 | | 12497 |
| VPR | RIGCQIISR | 74 | 8 | 47 | 73 | | 12498 |
| VPR | EAVRIIFPR | 29 | 8 | 59 | 92 | | 12499 |
| VPU | LVQRKQDR | 43 | 8 | 01 | 50 | | 12500 |
| VPU | VTLLSSSK | 94 | 8 | 01 | 50 | | 12501 |
| VPU | LVQRKQDRR | 43 | 9 | 01 | 50 | | 12502 |
| VPU | LVTLLSSSK | 91 | 9 | 01 | 50 | | 12503 |
| VPU | RIKEIRDDSDY | 64 | 11 | 01 | 50 | | 12504 |
| VPU | RIREIRDDSDY | 64 | 11 | 01 | 50 | | 12505 |
| VPU | WTIVFIEYR | 34 | 9 | 10 | 16 | | 12506 |
| VPU | TIVFIEYR | 35 | 8 | 10 | 16 | | 12507 |
| VPU | IDRLIDRIR | 54 | 9 | 10 | 16 | | 12508 |
| VPU | RLIDRIRER | 56 | 9 | 10 | 16 | | 12509 |
| VPU | KIDRLIDRIR | 52 | 10 | 10 | 16 | | 12510 |
| VPU | VVWTIVFIEYR | 31 | 11 | 10 | 16 | | 12511 |
| VPU | WTIVFIEY | 34 | 8 | 12 | 19 | | 12512 |
| VPU | IVFIEYRK | 36 | 8 | 12 | 19 | | 12513 |
| VPU | VVWTIVFIEY | 31 | 10 | 12 | 19 | | 12514 |
| VPU | IVVWTIVFIEY | 30 | 11 | 12 | 19 | | 12515 |
| VPU | LlDRIRER | 58 | 8 | 14 | 22 | | 12516 |
| VPU | KIDRLIDR | 52 | 8 | 15 | 23 | | 12517 |
| VPU | ILRQRKIDR | 46 | 9 | 15 | 23 | | 12518 |
| VPU | KILRQRKIDR | 45 | 10 | 15 | 23 | 0.0001 | 12519 |

[0398] TABLE XVIII
HIV A24 Motif Peptides with Binding Information

| | | | | | | | |
|---|---|---|---|---|---|---|---|
| | | | No. of | Sequence | Conservancy | | |
| Protein | Sequence | Position | Amino Acids | Frequency | (%) | A*2401 | SEQ ID NO. |

| | | | | | | | |
|---|---|---|---|---|---|---|---|
| ENV | IIMLQLTVW | 650 | 8 | 10 | 16 | | 12520 |
| ENV | WFDITNWL | 767 | 8 | 10 | 16 | | 12521 |
| ENV | WFDITNWLW | 767 | 9 | 10 | 16 | | 12522 |
| ENV | IIYCTPAGFAI | 262 | 10 | 10 | 16 | | 12523 |
| ENV | IWNNMTWME | 717 | 10 | 10 | 16 | | 12524 |
| ENV | WFDITNWLW | 767 | 11 | 10 | 16 | | 12525 |
| ENV | SYIIRLRDLLLI | 864 | 11 | 10 | 16 | | 12526 |
| ENV | HYCTPAGF | 262 | 8 | 11 | 17 | | 12527 |
| ENV | FYATGDIIGDI | 367 | 11 | 11 | 17 | | 12528 |
| ENV | FYATGDII | 367 | 8 | 12 | 19 | | 12529 |
| ENV | WMEWEREI | 723 | 8 | 12 | 19 | | 12530 |
| ENV | GWEALKYL | 896 | 8 | 12 | 19 | | 12531 |
| ENV | GWEGLKYL | 896 | 8 | 12 | 19 | | 12532 |
| ENV | TWMEWEREI | 722 | 9 | 12 | 19 | | 12533 |
| ENV | SYIIRLRDLLL | 864 | 10 | 12 | 19 | | 12534 |
| ENV | NMTWMEWER | 720 | 11 | 12 | 19 | | 12535 |
| ENV | YWGQELKNSA | 909 | 11 | 12 | 19 | | 12536 |
| ENV | LYKYKVVEI | 569 | 9 | 13 | 20 | | 12537 |
| ENV | SYIIRLRDFI | 864 | 9 | 13 | 20 | | 12538 |
| ENV | SYIIRLRDFIL | 864 | 10 | 13 | 20 | | 12539 |
| ENV | VMIISFNCGGE | 432 | 11 | 13 | 20 | | 12540 |
| ENV | LFSYIIRLRDFI | 862 | 11 | 13 | 20 | | 12541 |
| ENV | LFSYIIRLRDLL | 862 | 11 | 13 | 20 | | 12542 |
| ENV | SYFIRLRDLL | 864 | 9 | 14 | 22 | | 12543 |
| ENV | KYWWNLLQY | 909 | 10 | 14 | 22 | | 12544 |
| ENV | WWNLLQYW | 903 | 8 | 15 | 23 | | 12545 |
| ENV | YWWNLLQYW | 902 | 9 | 15 | 23 | | 12546 |
| ENV | KWASLWNWF | 760 | 11 | 15 | 23 | | 12547 |
| ENV | SFNCRGEF | 437 | 8 | 16 | 25 | | 12548 |
| ENV | SFNCRGIFF | 437 | 9 | 16 | 25 | | 12549 |
| ENV | KWLWYIKIF | 772 | 9 | 16 | 25 | | 12550 |
| ENV | KWLWYIKIFI | 772 | 10 | 16 | 25 | | 12551 |
| ENV | RYLRDQQLL | 671 | 9 | 17 | 27 | 0.2300 | 12552 |
| ENV | RYLRDQQLLGI | 671 | 11 | 17 | 27 | | 12553 |
| ENV | RYLRDQQL | 671 | 8 | 18 | 28 | | 12554 |
| ENV | SYIIRLRDF | 864 | 8 | 18 | 28 | | 12555 |
| ENV | AYDTEVHNVW | 73 | 10 | 18 | 28 | | 12556 |
| ENV | LFSYIIRLRDF | 862 | 10 | 18 | 28 | | 12557 |
| ENV | KWLWYIKI | 772 | 8 | 19 | 30 | | 12558 |
| ENV | AWDDLRSL | 853 | 8 | 20 | 31 | | 12559 |
| ENV | NMVEQMHEDI | 112 | 10 | 20 | 31 | 0.0004 | 12560 |
| ENV | AWDDLRSLCL | 853 | 10 | 20 | 31 | | 12569 |
| ENV | NMVEQMIIEDII | 112 | 11 | 20 | 31 | | 12562 |
| ENV | AWDDLRSLCL | 853 | 11 | 20 | 31 | | 12563 |
| ENV | FYCNTSGL | 445 | 8 | 21 | 33 | | 12564 |
| ENV | FFYCNTSGL | 444 | 9 | 21 | 33 | | 12565 |
| ENV | FYCNTSGLF | 445 | 9 | 21 | 33 | | 12566 |
| ENV | EFFYCNTSGL | 443 | 10 | 21 | 33 | | 12567 |
| ENV | FFYCNTSGLF | 444 | 10 | 21 | 33 | | 12568 |
| ENV | EFFYCNTSGLF | 443 | 11 | 21 | 33 | | 12569 |
| ENV | VWKEATTTL | 55 | 9 | 22 | 34 | 0.0300 | 12570 |
| ENV | VWKEATITLF | 55 | 10 | 22 | 34 | 0.2700 | 12571 |
| ENV | LFSYIIRLRDL | 862 | 10 | 22 | 34 | | 12572 |
| ENV | SYIIRLRDL | 864 | 8 | 23 | 36 | | 12573 |
| ENV | NWLWYIKI | 772 | 8 | 25 | 39 | | 12574 |
| ENV | NWLWYIKIF | 772 | 9 | 25 | 39 | | 12575 |
| ENV | KYKVVKIEPL | 563 | 10 | 25 | 39 | | 12576 |
| ENV | NWLWYIKIFI | 772 | 10 | 25 | 39 | | 12577 |
| ENV | GFLALAWDDL | 848 | 10 | 25 | 39 | | 12578 |
| ENV | RYLKDQQLLGI | 671 | 11 | 25 | 39 | | 12579 |
| ENV | KWASLWNW | 760 | 8 | 26 | 41 | | 12580 |
| ENV | KWASLWNWF | 760 | 9 | 26 | 41 | | 12581 |
| ENV | IIYCAPAGF | 262 | 8 | 27 | 42 | | 12582 |
| ENV | IIYCAPAGFAI | 262 | 10 | 27 | 42 | | 12583 |
| ENV | IIYCAPAGFAIL | 262 | 11 | 27 | 42 | | 12584 |
| ENV | QMIIEDIISL | 116 | 9 | 29 | 45 | | 12585 |
| ENV | LYKYKVVKI | 561 | 9 | 29 | 45 | 0.0200 | 12586 |
| ENV | RYLKDQQLL | 671 | 9 | 29 | 45 | 0.7600 | 12587 |
| ENV | QMHEDIISLW | 116 | 10 | 29 | 45 | | 12588 |
| ENV | GYSPLSFQTL | 806 | 10 | 29 | 45 | | 12589 |
| ENV | RYLKDQQL | 671 | 8 | 30 | 47 | | 12590 |
| ENV | IFIMIVGGLI | 779 | 10 | 33 | 52 | | 12591 |
| ENV | IMIVGGLIGL | 781 | 10 | 34 | 54 | | 12592 |
| ENV | IMIYGGLI | 781 | 8 | 35 | 56 | | 12593 |
| ENV | SPNCGGEFF | 437 | 9 | 35 | 55 | | 12594 |
| ENV | SPNCGGEF | 437 | 8 | 36 | 56 | | 12595 |
| ENV | DMRDNWRSEL | 552 | 10 | 37 | 58 | | 12596 |
| ENV | TMGAASITL | 615 | 9 | 39 | 61 | | 12597 |
| ENV | IFIMIVGGL | 779 | 9 | 41 | 64 | | 12598 |
| ENV | WYIKIFIMI | 775 | 9 | 43 | 67 | | 12599 |
| ENV | LWYIKIFIMI | 774 | 10 | 43 | 67 | | 12600 |
| ENV | IWGCSGKL | 681 | 8 | 48 | 75 | | 12601 |
| ENV | IWGCSGKLI | 681 | 9 | 48 | 75 | 0.0270 | 12602 |
| ENV | LWYIKIFI | 774 | 8 | 49 | 77 | | 12603 |
| ENV | VYYGVPVW | 49 | 8 | 55 | 86 | | 12604 |
| GAG | LYPLASLKSL | 544 | 10 | 09 | 17 | | 12605 |
| GAG | LYPLASLKSLF | 544 | 11 | 09 | 17 | | 12606 |
| GAG | KYKLKIIIVW | 29 | 9 | 10 | 16 | | 12607 |
| GAG | GWMTSNPPI | 269 | 9 | 10 | 16 | | 12608 |
| GAG | IMMQKSNF | 408 | 8 | 11 | 17 | | 12609 |
| GAG | LYCVIIQKI | 87 | 8 | 13 | 20 | | 12610 |
| GAG | MYSPTSILDI | 300 | 10 | 13 | 20 | | 12611 |
| GAG | RMYSPTSILDI | 299 | 11 | 13 | 20 | | 12612 |
| GAG | RMYSPTSI | 299 | 8 | 14 | 22 | | 12613 |
| GAG | MYSPTSIL | 300 | 8 | 14 | 22 | | 12614 |
| GAG | RMYSPTSIL | 299 | 9 | 14 | 22 | | 12615 |
| GAG | RFAVNPGL | 45 | 8 | 16 | 25 | | 12616 |
| GAG | LFNTVATL | 80 | 8 | 16 | 25 | | 12617 |
| GAG | WMTSNPPI | 270 | 8 | 16 | 25 | | 12618 |
| GAG | NWMTDTLL | 339 | 8 | 16 | 25 | | 12619 |
| GAG | KYRLKHLVW | 29 | 9 | 16 | 25 | | 12620 |
| GAG | RFAVPGLL | 45 | 9 | 16 | 25 | 0.0100 | 12621 |
| GAG | LYCVIIQRI | 87 | 8 | 18 | 28 | | 12622 |
| GAG | GWMTNNPPI | 269 | 9 | 18 | 28 | 0.0140 | 12623 |
| GAG | RFALNPGL | 45 | 8 | 20 | 31 | | 12624 |
| GAG | WMTNNPPI | 270 | 8 | 20 | 31 | | 12625 |
| GAG | RFALNPGLL | 45 | 9 | 20 | 31 | | 12626 |
| GAG | LYNTVATL | 80 | 8 | 22 | 34 | | 12627 |
| GAG | AWVKVIEEKA | 175 | 11 | 24 | 38 | | 12628 |
| GAG | AMQMLKETI | 218 | 9 | 26 | 41 | | 12629 |
| GAG | IMMQRGNF | 408 | 8 | 27 | 42 | | 12630 |
| GAG | DYVDRFFKTL | 319 | 10 | 27 | 42 | | 12631 |
| GAG | CFNCGKEGIII | 425 | 10 | 27 | 42 | | 12632 |
| GAG | CFNCGKEGIIL | 425 | 10 | 27 | 42 | | 12633 |
| GAG | DYVDRFYKTL | 319 | 10 | 28 | 44 | 0.0010 | 12634 |
| GAG | AWVKVVEEKA | 175 | 11 | 28 | 44 | | 12635 |
| GAG | NYPIVQNL | 152 | 8 | 31 | 48 | | 12636 |
| GAG | AMQMLKDTI | 218 | 9 | 33 | 52 | | 12637 |
| GAG | PFRDYVDRFF | 316 | 10 | 35 | 55 | | 12638 |
| GAG | NWMTETLL | 339 | 8 | 36 | 56 | | 12639 |
| GAG | RMYSPVSILDI | 299 | 11 | 38 | 59 | | 12640 |
| GAG | RMYSPVSI | 299 | 8 | 40 | 63 | | 12641 |
| GAG | RMYSPVSIL | 299 | 9 | 40 | 63 | | 12642 |
| GAG | MYSPVSILDI | 300 | 10 | 40 | 63 | | 12643 |
| GAG | MYSPYSIL | 300 | 8 | 42 | 66 | | 12644 |
| GAG | QMREPRGSDI | 248 | 10 | 44 | 69 | | 12645 |
| GAG | VWASRELERF | 36 | 10 | 45 | 70 | | 12646 |
| GAG | AFSPEVIPMF | 184 | 10 | 50 | 78 | 0.0078 | 12647 |
| GAG | IYKRWIIL | 285 | 8 | 54 | 84 | | 12648 |
| GAG | IYKRWIILGL | 285 | 10 | 54 | 84 | 0.0140 | 12649 |
| GAG | RWIILGLNKI | 288 | 10 | 56 | 88 | | 12650 |
| GAG | PFRDYVDRF | 316 | 9 | 63 | 98 | | 12651 |
| NEF | PMTYKGAF | 105 | 8 | 12 | 19 | | 12652 |
| NEF | TYKGAFDL | 107 | 8 | 12 | 19 | | 12653 |
| NEF | PMTYKGAFDL | 105 | 10 | 12 | 19 | | 12654 |
| NEF | VYIITQGFF | 192 | 8 | 13 | 20 | | 12655 |
| NEF | LWVYIITQGF | 190 | 9 | 13 | 20 | 12656 | |
| NEF | LWVYIITQGFF 190 | 10 | 13 | 20 | | 12657 | |
| NEF | NYTPGPGTRF | 206 | 10 | 13 | 20 | | 12658 |
| NEF | VYIITQGFFPD | 192 | 11 | 13 | 20 | | 12659 |
| NEF | RFPLTFGWCF | 216 | 10 | 17 | 27 | | 12660 |
| NEF | IYSKKRQEI | 175 | 9 | 18 | 29 | | 12661 |
| NEF | IYSKKRQEIL | 175 | 10 | 18 | 29 | | 12662 |
| NEF | AFDLSFFL | 111 | 8 | 18 | 28 | | 12663 |
| NEF | DWQNYTPGPG | 203 | 11 | 18 | 28 | | 12664 |
| NEF | RFPLTFGW | 216 | 8 | 20 | 32 | | 12665 |
| NEF | NYTPGPGI | 206 | 8 | 20 | 31 | | 12666 |
| NEF | KWSKSSIVGW | 4 | 10 | 20 | 31 | | 12667 |
| NEF | RYPLTFGWCF | 216 | 10 | 21 | 33 | | 12668 |
| NEF | VYHTQGYF | 192 | 8 | 21 | 33 | | 12669 |
| NEF | LWVYIITQGYF | 190 | 10 | 21 | 33 | | 12670 |
| NEF | VYIITQGYFPD | 192 | 11 | 21 | 33 | | 12671 |
| NEF | SFFLKEKGGL | 115 | 10 | 22 | 34 | | 12672 |
| NEF | FFLKEKGGL | 116 | 9 | 26 | 41 | | 12673 |
| NEF | RYPLTFGW | 216 | 8 | 27 | 43 | | 12674 |
| NEF | HFLKEKGCL | 116 | 9 | 29 | 45 | | 12675 |
| NEF | TFGWCFKL | 222 | 8 | 40 | 63 | | 12676 |
| NEF | GFPVRPQVPL | 93 | 10 | 48 | 75 | | 12677 |
| POL | AFPQGEAREF | 7 | 10 | 10 | 16 | | 12678 |
| POL | NMLTQLGCTL | 175 | 10 | 10 | 16 | | 12679 |
| POL | TWETWWTDY | 589 | 10 | 10 | 16 | | 12680 |
| POL | TWWTDYWQA | 592 | 11 | 10 | 16 | | 12681 |
| POL | CWWAGIQQEF | 882 | 10 | 11 | 17 | | 12682 |
| POL | IWGKIPKF | 574 | 8 | 11 | 17 | | 12683 |
| POL | WYQLETEPI | 618 | 9 | 11 | 17 | | 12684 |
| POL | WWAGIQQEF | 883 | 9 | 11 | 17 | | 12685 |
| POL | IYPGIKVKQL | 459 | 10 | 11 | 17 | | 12686 |
| POL | LWYQLETEPI | 617 | 10 | 11 | 17 | | 12687 |
| POL | WWAGIQQEFG | 883 | 11 | 11 | 17 | | 12688 |
| POL | QYDQIPIEI | 145 | 9 | 12 | 19 | | 12689 |
| POL | KWTVQPIVL | 427 | 9 | 12 | 19 | | 12690 |
| POL | LWQRPLVTVK | 92 | 11 | 12 | 19 | | 12691 |
| POL | TWWTEYWQA | 592 | 11 | 12 | 19 | | 12692 |
| POL | SFSFPQITLW | 84 | 10 | 13 | 20 | | 12693 |
| POL | SFSFPQITL | 84 | 9 | 14 | 22 | | 12694 |
| POL | WYQLIEKDPI | 618 | 9 | 14 | 22 | | 12695 |
| POL | YYRDSRDPL | 978 | 9 | 14 | 22 | | 12696 |
| POL | WWTDYWQAT | 593 | 10 | 14 | 22 | | 12697 |
| POL | LWYQLEKDPI | 617 | 10 | 14 | 22 | | 12698 |
| POL | VYYRDSRDPL | 977 | 10 | 14 | 22 | | 12699 |
| POL | YYRDSRDPLW | 978 | 10 | 14 | 22 | | 12700 |
| POL | LWQRPLVTIKI | 92 | 11 | 14 | 22 | | 12701 |
| POL | PFRKQNPDIVI | 359 | 11 | 14 | 22 | | 12702 |
| POL | WWTDYWQAT | 593 | 11 | 14 | 22 | | 12703 |
| POL | GYSAGERIVDI | 945 | 11 | 14 | 22 | | 12704 |
| POL | VYYRDSRDPL | 977 | 11 | 14 | 22 | | 12705 |
| POL | FFREDLAF | 1 | 8 | 15 | 23 | | 12706 |
| POL | IYPGIKVRQL | 459 | 10 | 15 | 23 | | 12707 |
| POL | PFRKQNPDI | 359 | 9 | 16 | 25 | | 12708 |
| POL | RWKPKMIGGI | 128 | 10 | 17 | 27 | | 12709 |
| POL | IWGKTPKFKL | 574 | 10 | 17 | 27 | | 12710 |
| POL | YFSVPLDKDF | 304 | 10 | 18 | 29 | | 12711 |
| POL | LWKGPAKLL | 986 | 9 | 18 | 28 | | 12712 |
| POL | NMLTQIGCTL | 175 | 10 | 18 | 28 | | 12713 |
| POL | IYAGIKVKQL | 459 | 10 | 18 | 28 | | 12714 |
| POL | LWKGPAKLLW | 986 | 10 | 18 | 28 | | 12715 |
| POL | AYFSVPLDKDF | 303 | 11 | 18 | 28 | | 12716 |
| POL | AMASDFNLPPI | 773 | 11 | 18 | 28 | | 12717 |
| POL | LWKGPAKL | 986 | 8 | 19 | 30 | | 12718 |
| POL | DYWQATWIPE | 596 | 11 | 19 | 30 | | 12719 |
| POL | DYWQATWI | 596 | 8 | 20 | 31 | | 12720 |
| POL | KFKLPIQKETW | 580 | 11 | 20 | 31 | | 12721 |
| POL | CWWAGIKQEF | 882 | 10 | 21 | 33 | | 12722 |
| POL | LWQRPLVTI | 92 | 9 | 21 | 33 | 0.0190 | 12723 |
| POL | WWAGIKQEF | 883 | 9 | 21 | 33 | 0.0120 | 12724 |
| POL | WWAGIKQEFG | 883 | 11 | 21 | 33 | | 12725 |
| POL | NFPQITLW | 86 | 8 | 22 | 34 | | 12726 |
| POL | AWVPAIIKGI | 726 | 9 | 22 | 34 | | 12727 |
| POL | SFPQITLW | 86 | 8 | 23 | 36 | | 12728 |
| POL | WWTEYWQAT | 593 | 10 | 23 | 36 | | 12729 |
| POL | WWTEYWQAT | 593 | 11 | 23 | 36 | | 12730 |
| POL | PYNTPIFAI | 244 | 9 | 24 | 38 | | 12731 |
| POL | YFLLKLAGRW | 851 | 10 | 25 | 39 | | 12732 |
| POL | AYFLLKLAGR | 850 | 11 | 25 | 39 | | 12733 |
| POL | KFRLPIQKEIW | 580 | 11 | 26 | 41 | | 12734 |
| POL | QYDQILIEI | 145 | 9 | 27 | 42 | | 12735 |
| POL | NWASQIYAGI | 454 | 10 | 27 | 42 | | 12736 |
| POL | KWTVQPIQL | 427 | 9 | 28 | 44 | | 12737 |
| POL | NWASQIYPGI | 454 | 10 | 29 | 45 | | 12738 |
| POL | IWGKTPKFRL | 574 | 10 | 30 | 47 | | 12739 |
| POL | WYQLEKEPI | 618 | 9 | 31 | 48 | 0.0001 | 12740 |
| POL | VYYDPSKDLI | 509 | 10 | 31 | 48 | 0.0150 | 12741 |
| POL | LWYQLEKEPI | 617 | 10 | 31 | 48 | | 12742 |
| POL | YFILKLAGRW | 851 | 10 | 31 | 48 | | 12743 |
| POL | AYFILKLAGR | 850 | 11 | 31 | 48 | | 12744 |
| POL | EMEKEGKISKI | 229 | 11 | 32 | 50 | | 12745 |
| POL | EYWQATWIPE | 596 | 11 | 33 | 52 | | 12746 |
| POL | YYRDSRDPI | 978 | 9 | 34 | 53 | | 12747 |
| POL | VYYRDSRDPI | 977 | 10 | 34 | 53 | | 12748 |
| POL | YYRDSRDPIW | 978 | 10 | 34 | 53 | | 12749 |
| POL | VYYRDSRDPI | 977 | 11 | 34 | 53 | | 12750 |
| POL | YYDPSKDLI | 510 | 9 | 35 | 55 | | 12751 |
| POL | IWKGPAKLL | 986 | 9 | 35 | 55 | | 12752 |
| POL | IWKGPAKLLW | 986 | 10 | 35 | 55 | | 12753 |
| POL | IWKGPAKL | 986 | 8 | 36 | 56 | | 12754 |
| POL | EYWQATWI | 596 | 8 | 37 | 58 | | 12755 |
| POL | PYNTPVFAI | 244 | 9 | 37 | 58 | 0.0310 | 12756 |
| POL | SWVPAIIKGI | 726 | 9 | 37 | 58 | | 12757 |
| POL | KYTAFTIPSI | 315 | 10 | 37 | 58 | | 12758 |
| POL | IFQSSMTKI | 348 | 9 | 38 | 59 | 0.0029 | 12759 |
| POL | IFQSSMTKIL | 348 | 10 | 38 | 59 | 0.0002 | 12760 |
| POL | VYYDPSKDL | 509 | 9 | 39 | 61 | 0.0004 | 12761 |
| POL | IYQEPFKNL | 533 | 9 | 40 | 63 | 0.0520 | 12762 |
| POL | GYSAGERIIDI | 945 | 11 | 40 | 63 | | 12763 |
| POL | FFRENLAF | 1 | 8 | 41 | 64 | | 12764 |
| POL | GYSAGERII | 945 | 9 | 41 | 64 | | 12765 |
| POL | GFIKVRQYDQI | 139 | 11 | 41 | 64 | | 12766 |
| POL | NWRAMASDF | 770 | 11 | 41 | 64 | | 12767 |
| POL | EMEKEGKI | 229 | 8 | 42 | 66 | | 12768 |
| POL | DFRKYTAF | 312 | 8 | 42 | 66 | | 12769 |
| POL | TYQIYQEPF | 530 | 9 | 42 | 66 | 0.3000 | 12770 |
| POL | KWKPKMIGGI | 128 | 10 | 42 | 66 | | 12771 |
| POL | DFRKYTAFTI | 312 | 10 | 42 | 66 | | 12772 |
| POL | QWTYQIYQEP | 528 | 11 | 42 | 66 | | 12773 |
| POL | YYDPSKDL | 510 | 8 | 43 | 67 | | 12774 |
| POL | SMTKILEPF | 352 | 9 | 43 | 67 | 0.0110 | 12775 |
| POL | NWRAMASDF | 770 | 9 | 43 | 67 | 0.0016 | 12776 |
| POL | AMASDFNL | 773 | 8 | 45 | 70 | | 12777 |
| POL | IWGKTPKF | 574 | 8 | 48 | 75 | | 12778 |
| POL | EWIEFVNTPPL | 605 | 10 | 50 | 78 | | 12779 |
| POL | GMDGPKVKQ | 201 | 10 | 51 | 80 | | 12780 |
| POL | TWIPEWEF | 601 | 8 | 52 | 81 | | 12781 |
| POL | YWQATWIPE | 597 | 10 | 52 | 81 | 0.0660 | 12782 |
| POL | SMNKELKKI | 905 | 9 | 53 | 83 | | 12783 |
| POL | SMNKELKKII | 905 | 10 | 53 | 83 | | 12784 |
| POL | EFVNTPPL | 607 | 8 | 54 | 84 | | 12785 |
| POL | GYIEAEVI | 834 | 8 | 54 | 84 | | 12786 |
| POL | SWTVNDIQKL | 440 | 10 | 54 | 84 | | 12787 |
| POL | EFVNTPPLVKL | 607 | 11 | 54 | 84 | | 12788 |
| POL | QWPLTIEKI | 210 | 9 | 56 | 88 | | 12789 |
| POL | DFWEVQLGI | 275 | 9 | 56 | 88 | | 12790 |
| POL | FWEVQLGI | 276 | 8 | 57 | 89 | | 12791 |
| POL | GYSAGERI | 945 | 8 | 57 | 89 | | 12792 |
| POL | LYVGSDLEI | 376 | 9 | 58 | 91 | | 12793 |
| POL | KWRKLVDF | 259 | 8 | 59 | 92 | | 12794 |
| POL | GWKGSPAI | 341 | 8 | 59 | 92 | | 12795 |
| POL | GWKGSPAIF | 341 | 9 | 59 | 92 | | 12796 |
| POL | IWQLDCTHL | 812 | 9 | 59 | 92 | 0.0095 | 12797 |
| POL | LWKGEGAVVI | 994 | 10 | 59 | 92 | | 12798 |
| POL | KWRKLVDFRE | 259 | 11 | 59 | 92 | | 12799 |
| POL | NFKRKGGI | 936 | 8 | 60 | 94 | | 12800 |
| POL | GYELHPDKW | 420 | 9 | 60 | 94 | 0.0001 | 12801 |
| POL | QMAVFIIINF | 929 | 9 | 60 | 94 | 0.0190 | 12802 |
| POL | WMGYELIIPDK | 418 | 11 | 6U | 94 | | 12803 |
| POL | IYQYMDDL | 369 | 8 | 61 | 95 | | 12804 |
| POL | YMDDLYVGSD | 372 | 11 | 61 | 95 | | 12805 |
| POL | KMIGGIGGF | 132 | 9 | 62 | 97 | 0.0011 | 12806 |
| POL | KMIGGIGGPI | 132 | 10 | 62 | 97 | 0.0001 | 12807 |
| POL | QYNVLPQGW | 334 | 9 | 63 | 98 | 0.0036 | 12808 |
| POL | RYQYNVLPQG | 332 | 11 | 63 | 98 | | 12809 |
| POL | PFLWMGYEL | 415 | 9 | 64 | 100 | | 12810 |
| REV | RWRERQRQI | 48 | 9 | 11 | 17 | | 12811 |
| REV | RWRARQRQI | 48 | 9 | 35 | 55 | | 12812 |
| TAT | CYCKKCCF | 28 | 8 | 11 | 17 | | 12813 |
| TAT | CFHCQVCF | 34 | 8 | 11 | 17 | | 12814 |
| TAT | CFLNKGLGI | 40 | 9 | 14 | 22 | | 12815 |
| VIF | RWQVLIVW | 4 | 8 | 10 | 16 | | 12816 |
| VIF | RYSTQVDPGL | 98 | 10 | 10) | 16 | | 12817 |
| VIF | CFSDSAIRKAI | 119 | 11 | 10 | 16 | | 12818 |
| VIF | QYLALKAL | 151 | 8 | 11 | 17 | | 12819 |
| VIF | QYLALAAL | 151 | 8 | 12 | 19 | | 12820 |
| VIF | RMKIRTWNSL | 15 | 10 | 12 | 19 | | 12821 |
| VIF | YWGLQTGERD | 71 | 11 | 12 | 19 | | 12822 |
| VIF | CFSESAIRKAI | 119 | 11 | 12 | 19 | | 12823 |
| VIF | ICFSESAIRNAI | 119 | 11 | 12 | 19 | | 12824 |
| VIF | VWQVDRMKI | 10 | 9 | 13 | 20 | | 12825 |
| VIF | IIMIIYFDCF | 113 | 8 | 15 | 23 | | 12826 |
| VIF | RMRIRTWKSL | 15 | 10 | 15 | 23 | | 12827 |
| VIF | RMRIRTWNSL | 15 | 10 | 15 | 23 | | 12828 |
| VIF | DWHLGQGVSI | 81 | 10 | 18 | 28 | | 12829 |
| VIF | YYPDCPSESAI | 115 | 11 | 20 | 31 | | 12830 |
| VIF | DWIILGIIGVSI | 81 | 10 | 21 | 33 | | 12831 |
| VIF | YWGLHTGERD | 71 | 11 | 22 | 34 | | 12832 |
| VIF | QYLALTALI | 151 | 9 | 28 | 44 | | 12833 |
| VIF | YFDCFSESAI | 116 | 10 | 28 | 44 | | 12834 |
| VIF | QYLALTAL | 151 | 8 | 33 | 52 | | 12835 |
| VIF | RWQVMIVW | 4 | 8 | 43 | 67 | | 12836 |
| VIF | VWQVDRMRI | 10 | 9 | 48 | 75 | | 12837 |
| VIF | IIFPRIWLIISL | 33 | 10 | 10 | 16 | | 12838 |
| VPR | IIFRIGCRIISRI | 71 | 11 | 11 | 17 | | 12839 |
| VPR | PWLIIGLGQIII | 37 | 10 | 12 | 19 | | 12840 |
| VPR | QYIYEIYGDT | 44 | 11 | 14 | 22 | | 12841 |
| VPR | TWLGVEAIIRI | 53 | 11 | 14 | 22 | | 12842 |
| VPR | TWAGVEAIIRI | 53 | 11 | 15 | 23 | | 12843 |
| VPR | TWAGVEAI | 53 | 8 | 16 | 25 | | 12844 |
| VPR | TWAGVEAII | 53 | 9 | 16 | 25 | | 12845 |
| VPR | IYNTYGDTW | 46 | 9 | 18 | 28 | | 12846 |
| VPR | TWEGVEAII | 53 | 9 | 19 | 30 | | 12847 |
| VPR | TWEGVEAI | 53 | 8 | 20 | 31 | | 12848 |
| VPR | IIFPRPWLIIGL | 33 | 10 | 24 | 38 | | 12849 |
| VPR | PYNEWTLEL | 14 | 9 | 30 | 47 | 0.1400 | 12850 |
| VPR | PYNEWTLELL | 14 | 10 | 30 | 47 | | 12851 |
| VPR | IYETYGDTW | 46 | 9 | 31 | 48 | 0.0580 | 12852 |
| VPR | EWTLELLEEL | 17 | 10 | 40 | 63 | | 12853 |
| VPR | IIPRIGCQIISRI | 71 | 11 | 44 | 69 | | 12854 |
| VPU | NYELAVGAL | 5 | 9 | 01 | 25 | | 12855 |
| VPU | NYELAVGALI | 5 | 10 | 01 | 25 | | 12856 |
| VPU | DYKLGVGAL | 10 | 9 | 02 | 29 | | 12857 |
| VPU | DYKLGVGALI | 10 | 10 | 02 | 29 | | 12858 |
| VPU | DYRLGVGAL | 10 | 9 | 03 | 43 | | 12859 |
| VPU | DYRLGVGALI | 10 | 10 | 03 | 43 | | 12860 |
| VPU | EMGHHAPW | 89 | 8 | 11 | 17 | | 12861 |
| VPU | VPIEYRKI | 37 | 8 | 12 | 19 | | 12862 |
| VPU | EYRKILRQRKI | 41 | 11 | 13 | 21 | | 12863 |

[0399] TABLE XIXa
HIV DR Super Motif Peptides

| | | | | | | | | |
|---|---|---|---|---|---|---|---|---|
| | | | Core | | | | | |
| | | Core | Sequence | | | Exemplary | Exemplary | |
| | Core | Sequence | Conservancy | | | Sequence | Sequence | |
| Protein | Sequence | Frequency | (%) | Exemplary Sequence | Position | Frequency | Conservancy (%) | SEQ ID NO. |

| | | | | | | | | |
|---|---|---|---|---|---|---|---|---|
| ENV | VSTQLLLNG | 61 | 95 | KPVVSTQLLLNGSLA | 299 | 29 | 45 | 12864 |
| ENV | VVSTQLLLN | 60 | 94 | IKPVVSTQLLLNGSL | 298 | 29 | 45 | 12865 |
| ENV | LTVWGIKQL | 59 | 92 | LLQLTVWGIKQLQAR | 651 | 26 | 41 | 12866 |
| ENV | LLSGIVQQQ | 58 | 91 | ARQLLSGIVQQQSNL | 627 | 22 | 34 | 12867 |
| ENV | WATHACVPT | 56 | 88 | HNVWATHACVPTDPN | 79 | 44 | 69 | 12868 |
| ENV | LGAAGSTMG | 55 | 86 | LGFLGAAGSTMGAAS | 605 | 36 | 56 | 12869 |
| ENV | VRQGYSPLS | 55 | 86 | VNRVRQGYSPLSFQT | 800 | 36 | 57 | 12870 |
| ENV | LLLNGSLAE | 54 | 84 | STQLLLNGSLAEEEV | 303 | 16 | 25 | 12871 |
| ENV | VKLTPLCVT | 53 | 83 | KPCVKLTPLCVTLNC | 130 | 29 | 45 | 12872 |
| ENV | LRAIEAQQH | 51 | 80 | NNLLRAIEAQQIILLQ | 639 | 18 | 28 | 12873 |
| ENV | VSTVQCTHG | 51 | 80 | CKNVSTVQCTHGIKP | 285 | 14 | 22 | 12874 |
| ENV | LGIWGCSGK | 50 | 78 | QQLLGIWGCSGKLIC | 676 | 46 | 72 | 12875 |
| ENV | LWDQSLKPC | 50 | 78 | IISLWDQSLKPCVKL | 121 | 35 | 55 | 12876 |
| ENV | LGFLGAAGS | 49 | 77 | AVFLGFLGAAGSTMG | 602 | 19 | 30 | 12877 |
| ENV | VWATHACVP | 49 | 77 | VHNVWATHACVPTDP | 78 | 34 | 53 | 12878 |
| ENV | WGIKQLQAR | 49 | 77 | LTVWGIKQLQARVLA | 654 | 39 | 61 | 12879 |
| ENV | LWYIKIFIM | 43 | 67 | TNWLWYIKIFIMIVG | 771 | 11 | 17 | 12880 |
| ENV | FCASDAKAY | 42 | 66 | TTLFCASDAKAYDTE | 61 | 18 | 28 | 12881 |
| ENV | IVGGLIGLR | 42 | 66 | FIMIVGGLIGLRIVF | 780 | 22 | 34 | 12882 |
| ENV | IFIMIVGGL | 41 | 64 | YIKIFIMIVGGLIGL | 776 | 30 | 47 | 12883 |
| ENV | VYYGVPVWK | 41 | 64 | WVTVYYGVPVWKEAT | 46 | 22 | 34 | 12884 |
| ENV | IKQLQARVL | 40 | 63 | VWGIKQLQARVLAVE | 656 | 31 | 49 | 12885 |
| ENV | IKIFIMIVG | 39 | 61 | LWYIKIWIMIVGGLI | 774 | 31 | 48 | 12886 |
| ENV | MGAASITLT | 39 | 61 | GSTMGAASITLTVQA | 613 | 28 | 44 | 12887 |
| ENV | YIKIFIMIV | 39 | 61 | WLWYIKIFIMIVGGL | 773 | 38 | 59 | 12888 |
| ENV | ITGLLLTRD | 37 | 58 | SSNITGLLLTRDGGK | 516 | 06 | 9 | 12889 |
| ENV | IPIHYCAPA | 36 | 56 | FEPIPIHYCAPAGFA | 255 | 21 | 33 | 12890 |
| ENV | MIVGGLIGL | 36 | 56 | IFIMIVGGLIGLRIV | 779 | 22 | 34 | 12891 |
| ENV | VQARQLLSG | 36 | 56 | TLTVQARQLLSGIVQ | 622 | 35 | 55 | 12892 |
| ENV | FEPIPIHYC | 35 | 55 | KVSFEPIPIHYCAPA | 252 | 17 | 27 | 12893 |
| ENV | LRSLCLFSY | 35 | 55 | WDDLRSLCLFSYHRL | 854 | 28 | 44 | 12894 |
| ENV | MWKNNMVEQ | 35 | 55 | NFNMWKNNMVEQMHE | 105 | 11 | 17 | 12895 |
| ENV | VHNVWATHA | 35 | 55 | DTEVHNVWATIIACVP | 75 | 17 | 27 | 12896 |
| ENV | WKNNMVEQM | 35 | 55 | FNMWKNNMVEQMHED | 106 | 20 | 31 | 12897 |
| ENV | YYGVPVWKE | 35 | 55 | VTVYYGVPVWKEATT | 47 | 22 | 34 | 12898 |
| ENV | LLQLTVWGI | 34 | 53 | QQHLLQLTVWGIKQL | 648 | 34 | 53 | 12899 |
| ENV | IEPLGVAPT | 33 | 52 | VVKIEPLGVAPTKAK | 566 | 12 | 19 | 12900 |
| ENV | IKPVVSTQL | 33 | 52 | THGIKPVVSTQLLLN | 295 | 32 | 50 | 12901 |
| ENV | LQARVLAVE | 33 | 52 | IKQLQARVLAVERYL | 659 | 32 | 50 | 12902 |
| ENV | WDDLRSLCL | 33 | 52 | ALAWDDLRSLCLFSY | 851 | 18 | 28 | 12903 |
| ENV | IINIHTPHR | 01 | 50 | SRPIINIHTPHREKR | 581 | 01 | 2 | 12904 |
| ENV | INIHTPHRE | 01 | 50 | RPTINIHTPHREKRA | 582 | 01 | 2 | 12905 |
| ENV | ITQACPKVS | 32 | 50 | TSVITQACPKVSFEP | 242 | 08 | 13 | 12906 |
| ENV | IVQQQSNLL | 32 | 50 | LSOIVQQQSNLLRAI | 631 | 26 | 41 | 12907 |
| ENV | LGNNSTNST | 01 | 50 | NKTLGNNSTNSTLGN | 151 | 01 | 2 | 12908 |
| ENV | VISTRTHRE | 01 | 50 | ARPVISTRTHREKRA | 580 | 01 | 2 | 12909 |
| ENV | WRWGTLFLG | 01 | 50 | QNLWRWGTLFLGMLM | 12 | 01 | 2 | 12910 |
| ENV | WRWGTMLLG | 01 | 50 | QHLWRWGTMLLGMLM | 12 | 03 | 5 | 12911 |
| ENV | FAVLSIVNR | 31 | 48 | RIVFAVLSIVNRVRQ | 791 | 14 | 22 | 12912 |
| ENV | LLNGSLAEE | 31 | 48 | TQLLLNGSLAEEEVV | 304 | 14 | 22 | 12913 |
| ENV | LTPLCVTLN | 29 | 45 | CVKLTPLCVTLNCTD | 132 | 11 | 17 | 12914 |
| ENV | LYKYKVVKI | 29 | 45 | RSELYKYKVVKIEPL | 558 | 23 | 36 | 12915 |
| ENV | VPWNSSWSN | 29 | 45 | TTNVPWNSSWSNKSL | 691 | 03 | 5 | 12916 |
| ENV | YRLINCNTS | 28 | 44 | YKEYRLINCNTSAIT | 232 | 01 | 8 | 12917 |
| ENV | IHYCAPAGF | 27 | 42 | PIPIHYCAPAGFAIL | 258 | 26 | 41 | 12918 |
| ENV | LKDQQLLGI | 27 | 42 | ERYLKDQQLLGIWGC | 670 | 25 | 39 | 12919 |
| ENV | YKYKVVKIE | 27 | 42 | SELYKYKVVKIEPLG | 559 | 24 | 38 | 12920 |
| ENV | IRPVVSTQL | 26 | 41 | THGIRPVVSTQLLLN | 295 | 26 | 41 | 12921 |
| ENV | LDKWASLWN | 26 | 41 | LLALDKWASLWNWFD | 755 | 08 | 13 | 12922 |
| ENV | LRIVFAVLS | 26 | 41 | LIGLRIVFAVLSIVN | 787 | 10 | 16 | 12923 |
| ENV | LNGSLAEEE | 25 | 39 | QLLLNGSLAEEEVVI | 305 | 13 | 20 | 12924 |
| ENV | YKVVKIEPL | 25 | 39 | LYKYKVVKIEPLGVA | 561 | 23 | 36 | 12925 |
| ENV | LKGLRLGWE | 11 | 37 | RSSLKGLRLGWEGLK | 885 | 04 | 7 | 12926 |
| ENV | FSYHRLRDL | 23 | 36 | LCLFSYIIRLRDLLLI | 860 | 08 | 13 | 12927 |
| ENV | INCTRPNNN | 23 | 36 | SVEINCTRPNNNTRK | 340 | 05 | 8 | 12928 |
| ENV | VVKIEPLGV | 23 | 36 | KYKVVKIEPLGVAPT | 563 | 23 | 36 | 12929 |
| ENV | WKEATTTLF | 23 | 36 | VPVWKEATTTLFCAS | 53 | 22 | 34 | 12930 |
| ENV | IGLRIVFAV | 22 | 34 | GGLIGLRIVFAVLSI | 785 | 12 | 19 | 12931 |
| ENV | FFYCNISGL | 21 | 33 | GGEFFYCNTSGLFNS | 411 | 07 | 11 | 12932 |
| ENV | FGLGALFLG | 01 | 33 | RAAFGLGALFLGFLG | 594 | 01 | 2 | 12933 |
| ENV | FYCNTSGLF | 21 | 33 | GEFFYCNTSGLFNST | 442 | 07 | 11 | 12934 |
| ENV | LIGLRIVFA | 21 | 33 | VGGLIGLRIVFAVLS | 784 | 17 | 27 | 12935 |
| ENV | VGLGAVFLG | 01 | 33 | KRAVGLGAVFLGFLG | 593 | 06 | 9 | 12936 |
| ENV | VGLGMLFLG | 01 | 33 | KRAVGLGMLFLGVLS | 594 | 01 | 2 | 12937 |
| ENV | ICTPAVPWN | 20 | 31 | GKLICTIAVPWNSSW | 686 | 09 | 14 | 12938 |
| ENV | ICTTNVPWN | 20 | 31 | GKLICTTNVPWNSSW | 686 | 08 | 13 | 12939 |
| ENV | LGVAPTKAK | 19 | 30 | IEPLCVAPTKAKRRV | 569 | 15 | 23 | 12940 |
| ENV | LICTTAVPW | 19 | 30 | SGKLICTTAVPWNSS | 685 | 09 | 14 | 12941 |
| ENV | LRDQQLLGI | 19 | 30 | ERYLRDQQLLGIWGC | 670 | 17 | 27 | 12942 |
| ENV | VFLGFLGAA | 19 | 30 | LGAVFLGFLGAAGST | 600 | 09 | 14 | 12943 |
| ENV | FSYHRLRDF | 18 | 28 | LCLFSYHRLRDFILI | 860 | 08 | 13 | 12944 |
| ENV | IPIHYCTPA | 18 | 28 | FEPIPIHYCTPAGFA | 255 | 10 | 16 | 12945 |
| ENV | IVFAVLSIV | 18 | 28 | GLRIVFAVLSIVNRV | 789 | 16 | 25 | 12946 |
| ENV | VFAVLSIVN | 18 | 28 | LRIVFAVLSIVNRVR | 790 | 16 | 25 | 12947 |
| ENV | VPWNASWSN | 18 | 28 | TTAVPWNASWSNKSL | 691 | 06 | 9 | 12948 |
| ENV | IGLRIIFAV | 17 | 27 | GGLIGLRIIPAYLST | 785 | 11 | 17 | 12949 |
| ENV | IRQAHCNIS | 17 | 27 | IODIRQAHCNISRAK | 378 | 02 | 3 | 12950 |
| ENV | VAPTKAKRR | 17 | 27 | PLGVAPTKAKRRVVQ | 571 | 10 | 16 | 12951 |
| ENV | FNGTGPCKN | 16 | 25 | DKKPNGTGPCKNVST | 276 | 05 | 8 | 12952 |
| ENV | IGPGQTFYA | 01 | 25 | SVRIGPGQTFYATGD | 355 | 03 | 5 | 12953 |
| ENV | IGSGQAFYV | 01 | 25 | RYSIGSGQAFYVTGK | 358 | 01 | 2 | 12954 |
| ENV | IRYLNLVNQ | 01 | 25 | QTAIRYLNLVNQTEN | 400 | 01 | 2 | 12955 |
| ENV | LIGLRIIFA | 16 | 25 | VGGLIGLRIIFAVLS | 784 | 12 | 19 | 12956 |
| ENV | LLQYWSQEL | 16 | 25 | WWNLLQYWSQELKNS | 903 | 09 | 14 | 12957 |
| ENV | LRNLCLFSY | 16 | 25 | WDDLRNLCLFSYHRL | 854 | 11 | 17 | 12958 |
| ENV | LVSGFLALA | 16 | 25 | SIRLVSGFLALAWDD | 842 | 09 | 14 | 12959 |
| ENV | VSGFLALAW | 16 | 25 | IRLVSGFLALAWDDL | 843 | 09 | 14 | 12960 |
| ENV | EDPIPIHYC | 15 | 23 | KVTFDPIPIHYCTPA | 252 | 03 | 5 | 12961 |
| ENV | IIFAVLSIV | 15 | 23 | GLRIIFAVLSIVNRV | 789 | 13 | 20 | 12962 |
| ENV | LINCNTSAI | 15 | 23 | EYRLINCNTSAITQA | 234 | 04 | 9 | 12963 |
| ENV | LLNATAIAV | 15 | 23 | AVSLLNATAIAVAEG | 918 | 10 | 16 | 12964 |
| ENV | LRIIFAVLS | 15 | 23 | LIGLRIIFAVLSIVN | 787 | 11 | 17 | 12965 |
| ENV | VITQACPKV | 15 | 23 | NTSVITQACPKVSFE | 241 | 08 | 13 | 12966 |
| ENV | YWWNLLQYW | 15 | 23 | VLKYWWNLLQYWSQE | 899 | 07 | 11 | 12967 |
| ENV | FAILKCNDK | 14 | 22 | PAGFAILKCNDKKFN | 266 | 09 | 14 | 12968 |
| ENV | IFAVLSIVN | 14 | 22 | LRIIFAVLSIVNRVR | 790 | 13 | 20 | 12969 |
| ENV | INCNTSAIT | 14 | 22 | YRLINCNTSAITQAC | 235 | 14 | 22 | 12970 |
| ENV | LNATAIAVA | 14 | 22 | VSLLNATAIAVAEGT | 919 | 10 | 16 | 12971 |
| ENV | WNSSWSNKS | 14 | 22 | NVPWNSSWSNKSLDE | 693 | 03 | 5 | 12972 |
| ENV | WNASWSNKS | 13 | 21 | NVPWNASWSNKSYED | 693 | 02 | 3 | 12973 |
| ENV | ICTTTVPWN | 13 | 20 | GKLTCTTTVPWNASW | 686 | 06 | 9 | 12974 |
| ENV | LLKLTVWGI | 13 | 20 | QQHLLKLTVWGIKQL | 648 | 13 | 20 | 12975 |
| ENV | LYKYKVVEI | 13 | 20 | RSELYKYKVVEIKPL | 558 | 05 | 8 | 12976 |
| ENV | MFLGFLGAA | 13 | 20 | LGAMFLGFLGAAGST | 600 | 07 | 11 | 12977 |
| ENV | MHSFNCGGE | 13 | 20 | EIVMHSFNCGGEFFY | 430 | 13 | 20 | 12978 |
| ENV | YWSQELKNS | 13 | 20 | LLQYWSQELKNSAVS | 906 | 10 | 16 | 12979 |
| ENV | IGAVFLGFL | 12 | 19 | AVCIGAVFLGFLGAA | 595 | 09 | 14 | 12980 |
| ENV | LIAARTVEL | 12 | 19 | DFILIAARTVELLGH | 870 | 04 | 6 | 12981 |
| ENV | LICTTTVPW | 12 | 19 | SGKLICTTTVPWNAS | 685 | 06 | 9 | 12982 |
| ENV | LLNGSLAEG | 12 | 19 | TQLLLNGSLAEGEII | 304 | 03 | 5 | 12983 |
| ENV | YWGQELKNS | 12 | 19 | LVWYWGQELKNSAIS | 906 | 02 | 3 | 12984 |
| ENV | IAARTVELL | 11 | 17 | FILIAARTVELLGHS | 871 | 03 | 5 | 12985 |
| ENV | LFLGFLGAA | 11 | 17 | IGALFLGFLGAAGST | 600 | 06 | 9 | 12986 |
| ENV | LKNSAVSLL | 11 | 17 | SQELKNSAVSLLNAT | 911 | 08 | 13 | 12987 |
| ENV | VGTGAVFLG | 11 | 17 | KRAVGIGAVFLGFLG | 593 | 11 | 17 | 12988 |
| ENV | VSLLNATAI | 11 | 17 | NSAVSLLNATAIAVA | 916 | 09 | 14 | 12989 |
| ENV | YATGDIIGD | 11 | 17 | QTPYATGDIIGDIRQ | 365 | 04 | 6 | 12990 |
| ENV | IAIAVAEGT | 10 | 16 | LDIIAIAVAEGTDRI | 922 | 02 | 3 | 12991 |
| ENV | IHYCTPAGF | 10 | 16 | PIPIHYCTPAGFAIL | 258 | 08 | 13 | 12992 |
| ENV | ILGLVTICS | 10 | 16 | GTLILGLVIICSASN | 19 | 03 | 5 | 12993 |
| ENV | IWNNMTWME | 10 | 16 | VDETWNNMTWMEWER | 714 | 01 | 2 | 12994 |
| ENV | LGLVIICSA | 10 | 16 | TLILGLVIICSASNN | 20 | 04 | 6 | 12995 |
| ENV | LRDFILIAA | 10 | 16 | YHRLRDFILIAARTV | 865 | 06 | 9 | 12996 |
| ENV | LTPLCVTLD | 10 | 16 | CVKLTPLCVTLDCHN | 132 | 03 | 5 | 12997 |
| ENV | MLQLTVWGI | 10 | 16 | QQHMLQLTVWGIKQL | 648 | 08 | 13 | 12998 |
| ENV | VEINCTRPN | 10 | 16 | NESVEINCTRPNWNT | 338 | 02 | 3 | 12999 |
| ENV | VRQLLSGIV | 10 | 16 | TVQVRQLLSGIVQQQ | 624 | 08 | 13 | 13000 |
| ENV | LILGLVIIC | 09 | 15 | WGTLILGLVIICSAS | 18 | 07 | 11 | 13001 |
| GAG | VGGHQAAMQ | 60 | 94 | LNTVGGHQAAMQMLK | 209 | 47 | 73 | 13002 |
| GAG | LLVQNANPD | 59 | 92 | TETLLVQNANPDCKT | 342 | 26 | 41 | 13003 |
| GAG | VQNANPDCK | 59 | 92 | TLLVQNANPDCKTIL | 344 | 44 | 69 | 13004 |
| GAG | LGLNKIVRM | 58 | 91 | WIILGLNKIVRMYSP | 289 | 55 | 86 | 13005 |
| GAG | LSEGATPQD | 58 | 91 | FSALSEGATPQDLNT | 193 | 29 | 45 | 13006 |
| GAG | WIILGLNKI | 57 | 89 | YKRWIILGLNKIYRM | 286 | 54 | 84 | 13007 |
| GAG | LEEMMTACQ | 56 | 88 | GATLEEMMTACQGVG | 364 | 27 | 42 | 13008 |
| GAG | YKRWIILGL | 55 | 86 | GEIYKRWIILGLNKI | 283 | 37 | 58 | 13009 |
| GAG | IYKRWIILG | 54 | 84 | VGEIYKRWIILGLNK | 282 | 37 | 58 | 13010 |
| GAG | VSQNYPIVQ | 48 | 83 | SSQVSQNYPIVQNLQ | 145 | 09 | 19 | 13011 |
| GAG | WEKIRLRPG | 50 | 78 | LDKWEKIRLRPGGKK | 13 | 16 | 25 | 13012 |
| GAG | IAGTTSTLQ | 46 | 72 | GSDIAGTTSTLQEQI | 254 | 45 | 70 | 13013 |
| GAG | WASRELERF | 46 | 72 | HLVWASRELERFALN | 34 | 17 | 27 | 13014 |
| GAG | IPMFSALSE | 45 | 70 | PEVIFMFSALSEGAT | 187 | 44 | 69 | 13015 |
| GAG | MFSALSEGA | 45 | 70 | VIPMFSALSEGATPQ | 189 | 43 | 67 | 13016 |
| GAG | VIFMFSALS | 45 | 70 | SPEVIFMFSALSEGA | 186 | 40 | 63 | 13017 |
| GAG | MYSPVSILD | 41 | 64 | IVRMYSPVSILDIRQ | 297 | 23 | 36 | 13018 |
| GAG | IVRMYSPVS | 40 | 63 | LNKIVRMYSPVSILD | 294 | 39 | 61 | 13019 |
| GAG | VRMYSPVSI | 40 | 63 | NKIVRMYSPVSILDI | 295 | 38 | 59 | 13020 |
| GAG | YSPVSILDI | 40 | 63 | VRMYSPVSILDIRQG | 298 | 23 | 36 | 13021 |
| GAG | MTETLLVQN | 38 | 59 | KNWMTETLLVQNANP | 338 | 34 | 53 | 13022 |
| GAG | WMTETLLVQ | 37 | 58 | VKNWMTETLLVQNAN | 337 | 34 | 53 | 13023 |
| GAG | ISPRTLNAW | 36 | 56 | HQAISPRTLNAWVKV | 165 | 27 | 42 | 13024 |
| GAG | VKNWMTETL | 36 | 56 | TQEVKNWMTETLLVQ | 334 | 14 | 22 | 13025 |
| GAG | IKCFNCGKE | 34 | 53 | QKRIKCFNCGKEGHL | 418 | 05 | 8 | 13026 |
| GAG | IPVGEIYKR | 34 | 53 | NPPIPVGEIYKRWII | 277 | 32 | 51 | 13027 |
| GAG | YTAVFMQRG | 02 | 50 | KGGYTAVIMQRGQNP | 399 | 02 | 3 | 13028 |
| GAG | VATLYCVHQ | 30 | 47 | YNTVATLYCVHQRIE | 81 | 07 | 11 | 13029 |
| GAG | WDRLHPVHA | 29 | 45 | AAEWDRLIIPVHAGPI | 230 | 22 | 34 | 13030 |
| GAG | FLQSRPEPT | 28 | 44 | PGNFLQSRPEPTAPP | 483 | 27 | 43 | 13031 |
| GAG | FKTLRAEQA | 27 | 42 | DRFFKTLRAEQATQE | 322 | 16 | 25 | 13032 |
| GAG | MVHQAISPR | 27 | 42 | QGQMVHQAISPRTLN | 160 | 26 | 41 | 13033 |
| GAG | VHQAISPRT | 27 | 42 | GQMVHQAISPRTLNA | 161 | 27 | 42 | 13034 |
| GAG | YKTLRAEQA | 27 | 42 | DRFYKTLRAEQASQE | 322 | 12 | 19 | 13035 |
| GAG | VSILDTRQG | 25 | 39 | YSPVSILDIRQGPKE | 301 | 24 | 38 | 13036 |
| GAG | LAEAMSQVT | 23 | 37 | ARVLAEAMSQVTNSA | 384 | 08 | 13 | 13037 |
| GAG | LGKIWPSHK | 23 | 36 | ANFLGKIWPSHKGRP | 467 | 22 | 34 | 13038 |
| GAG | VKCFNCGKE | 23 | 36 | RKTVKCFNCGKEGHI | 420 | 07 | 11 | 13039 |
| GAG | YNTVATLYC | 23 | 36 | RSLYNTVATLYCVHQ | 78 | 11 | 17 | 13040 |
| GAG | LHPVHAGPI | 22 | 34 | WDRLHPVHAGPIAPG | 233 | 15 | 23 | 13041 |
| GAG | LYNTVATLY | 22 | 34 | LRSLYNTVATLVCVH | 77 | 13 | 20 | 13042 |
| GAG | MTDTLLVQN | 22 | 34 | KNWMTDTLLVQNANP | 338 | 16 | 25 | 13043 |
| GAG | WMTDTLLVQ | 22 | 34 | VKNWMTDTLLVQNAN | 337 | 16 | 25 | 13044 |
| GAG | IEVKDTKEA | 21 | 33 | HQRIEVKDTKEALDK | 91 | 07 | 11 | 13045 |
| GAG | LQGQMVHQA | 21 | 33 | VQNLQGQMVHQAISP | 156 | 15 | 23 | 13046 |
| GAG | MTNNPPIPV | 20 | 31 | IGWMTNNPPIPVGEI | 268 | 16 | 25 | 13047 |
| GAG | WMTNNPPIP | 20 | 31 | QIGWMTNNPPIPVGE | 267 | 16 | 25 | 13048 |
| GAG | IAPGQMREP | 19 | 30 | AGPIAPGQMREPRGS | 241 | 19 | 30 | 13049 |
| GAG | VHAGPIAPG | 19 | 30 | LHPVHAGPIAPGQMR | 236 | 14 | 22 | 13050 |
| GAG | LGPGATLEE | 18 | 28 | LRALGPGATLEEMMT | 358 | 09 | 14 | 13051 |
| GAG | VHAGPIPPG | 18 | 28 | VHPVHAGPIPPGQMR | 236 | 10 | 16 | 13052 |
| GAG | IPPGQMREP | 17 | 27 | AGPIPPGQMREPRGS | 241 | 16 | 25 | 13053 |
| GAG | LSPRTLNAW | 17 | 27 | HQALSPRTLNAWVKV | 165 | 10 | 16 | 13054 |
| GAG | YRLKHLVWA | 17 | 27 | KKKYRLKHLVWASRE | 27 | 13 | 20 | 13055 |
| GAG | LGPAATLEE | 16 | 25 | LKALGPAATLEEMMI | 358 | 16 | 25 | 13056 |
| GAG | LKALGPAAT | 16 | 25 | KTILKALGPAATLEE | 355 | 16 | 25 | 13057 |
| GAG | LKDKEPPLA | 01 | 25 | QEQLKDKEPPLASLR | 532 | 01 | 2 | 13058 |
| GAG | LSGGKLDAW | 16 | 25 | ASVLSGGKLDAWEKI | 5 | 14 | 22 | 13059 |
| GAG | MISNPPIPV | 16 | 25 | IGWMTSNPPIPVGEI | 268 | 06 | 9 | 13060 |
| GAG | VKNWMTDTL | 16 | 25 | TQDVKNWMTDTLLVQ | 334 | 11 | 17 | 13061 |
| GAG | VSILDIKQG | 16 | 25 | YSPVSILD1KQGPKE | 301 | 16 | 25 | 13062 |
| GAG | WMTSNPPIP | 16 | 25 | QIGWMTSNPPIPVGE | 267 | 06 | 10 | 13063 |
| GAG | FNTVATLYC | 13 | 23 | KSLFNTVATLYCVIIQ | 78 | 07 | 11 | 13064 |
| GAG | IPMFTALSE | 15 | 23 | PEVIPMFTALSEGAT | 187 | 13 | 20 | 13065 |
| GAG | LASLKSLFG | 15 | 23 | LYPLASLKSLFGNDP | 544 | 06 | 11 | 13066 |
| GAG | LERFAVNPG | 15 | 23 | SRELERFAVNPGLLE | 39 | 14 | 22 | 13067 |
| GAG | LFNTVATLY | 15 | 23 | LRSLFNTVATLYCVH | 77 | 07 | 11 | 13068 |
| GAG | MFTALSEGA | 15 | 23 | VIPMFTALSEGATPQ | 189 | 14 | 22 | 13069 |
| GAG | WDRVHPVHA | 15 | 23 | AAEWDRVKPVIIAGPI | 230 | 12 | 19 | 13070 |
| GAG | IVRMYSPTS | 14 | 22 | LNKIVRMYSPTSILD | 294 | 13 | 20 | 13071 |
| GAG | LERFALNPG | 14 | 22 | SRELERFALNPGLLE | 39 | 14 | 22 | 13072 |
| GAG | LQEQIAWMT | 14 | 22 | TSTLQEQIAWMTGNP | 261 | 05 | 8 | 13073 |
| GAG | VHPVHAGPI | 14 | 22 | WDRVHPVIIAGPIPPG | 233 | 11 | 17 | 13074 |
| GAG | VIPMFTALS | 14 | 22 | SPEVIPMFTALSEGA | 186 | 13 | 20 | 13075 |
| GAG | VRMYSPTSI | 14 | 22 | NKIVRMYSPTSILDI | 295 | 23 | 20 | 13076 |
| GAG | LGKIWPSNK | 13 | 20 | ANFLGKIWPSNKGRP | 467 | 13 | 20 | 13077 |
| GAG | LTSLKSLFG | 13 | 20 | LYPLTSLKSLFGNDP | 544 | 04 | 7 | 13078 |
| GAG | MYSPTSILD | 13 | 20 | IVRMYSPTSILDIRQ | 297 | 12 | 19 | 13079 |
| GAG | YKLKHIVWA | 13 | 20 | KKKYKLKHIVWASRE | 27 | 08 | 13 | 13080 |
| GAG | YSPTSILDI | 13 | 20 | VRMYSPTSILDIRQG | 298 | 12 | 19 | 13081 |
| GAG | LTSLRSLFG | 12 | 19 | LYPLTSLRSLFGNDP | 544 | 04 | 7 | 13082 |
| GAG | MMLNIVGGH | 12 | 19 | DLNMMLNIVGGHQAA | 204 | 12 | 19 | 13083 |
| GAG | IDVKDTKEA | 11 | 17 | HQRIDVKDTKEALDK | 91 | 03 | 5 | 13084 |
| GAG | IGWMTSNPP | 11 | 17 | QEQIGWMTSNPPIPV | 265 | 09 | 14 | 13085 |
| GAG | IPVGDIYKR | 11 | 17 | NPPIPVGDIYKRWII | 277 | 08 | 13 | 13086 |
| GAG | LYPLASLKS | 09 | 17 | DKELYPLASLKSLFG | 541 | 06 | 10 | 13087 |
| GAG | VHQALSPRT | 11 | 17 | GQMVHQALSPRTLNA | 161 | 07 | 11 | 13088 |
| GAG | VNPGLLETS | 11 | 17 | RPAVNPGLLETSEGC | 45 | 11 | 17 | 13089 |
| GAG | YPLASLKSL | 08 | 17 | KELYPLASLKSLFGN | 542 | 06 | 9 | 13090 |
| GAG | FLQNRPEPT | 10 | 16 | PGNFLQNRPEPTAPP | 483 | 10 | 16 | 13091 |
| GAG | IMMQKSNFK | 10 | 16 | AAAIMMQKSNFKGPR | 405 | 01 | 25 | 13092 |
| GAG | LAEAMSQVQ | 10 | 16 | ARVLAEAMSQVQQSN | 384 | 02 | 3 | 13093 |
| GAG | LGKIWPSSK | 10 | 16 | ANFLGKIWPSSKGRP | 467 | 10 | 16 | 13094 |
| GAG | LNPGLLETA | 10 | 16 | RFALNPGLLETAEGC | 45 | 08 | 13 | 13095 |
| GAG | YPLASLRSL | 07 | 15 | KELYPLASLRSLFGN | 542 | 04 | 6 | 13096 |
| NEF | WQNYTPGPG | 52 | 83 | FPDWQNYTPGPGIRY | 200 | 15 | 23 | 13097 |
| NEF | VRPQVPLRP | 48 | 75 | GFPVRPQVPLRPMTY | 93 | 36 | 56 | 13098 |
| NEF | VPLRPMTYK | 46 | 73 | RPQVPLRPMTYKGAF | 98 | 07 | 11 | 13099 |
| NEF | LTFGWCFKL | 39 | 61 | RYPLTFGWCFKLVPV | 216 | 15 | 24 | 13100 |
| NEF | ILDLWVYHT | 34 | 53 | RQEILDLWVYHTQGY | 182 | 12 | 19 | 13101 |
| NEF | WCFKLVPVD | 26 | 41 | TFGWCFKLVPVDPRE | 222 | 07 | 11 | 13102 |
| NEF | LWVYHTQGY | 21 | 33 | ILDLWVYHTQGYFPD | 186 | 21 | 33 | 13103 |
| NEF | WSKSSIVGW | 20 | 31 | GGKWSKSSIVGWPAI | 2 | 05 | 8 | 13104 |
| NEF | ILDLWVYNT | 19 | 30 | RQDILDLWVYNTQGY | 182 | 05 | 8 | 13105 |
| NEF | LLHPMSQHG | 17 | 27 | NNCLLHPMSQHGMDD | 254 | 06 | 9 | 13106 |
| NEF | LLHPICQHG | 16 | 25 | NNSLLHPICQHGMED | 254 | 04 | 6 | 13107 |
| NEF | IRYPLTFGW | 13 | 20 | GPGIRYPLTFGWCFK | 210 | 06 | 9 | 13108 |
| NEF | ITSSNTAAT | 13 | 20 | HGAITSSNTAATNAD | 61 | 10 | 16 | 13109 |
| NEF | LEKHGAITS | 13 | 20 | SRDLEKHGAITSSNT | 50 | 13 | 20 | 13110 |
| NEF | LWVYHTQGF | 13 | 20 | ILDLWVYHTQGFFPD | 186 | 13 | 20 | 13111 |
| NEF | MTYKGAFDL | 12 | 19 | LRPMTYKGAFDLSFF | 103 | 06 | 9 | 13112 |
| NEF | LVPVDPREV | 11 | 17 | CFKLVPVDPREVEEA | 226 | 08 | 13 | 13113 |
| NEF | VGWPAIRER | 10 | 17 | SSIVGWPAIRERMRR | 8 | 03 | 5 | 13114 |
| NEF | WCFKLVPVE | 11 | 17 | TFGWCFKLVPVEPEK | 222 | 04 | 6 | 13115 |
| NEF | FDSRLAFHH | 10 | 16 | EWRFDSRLAFHHVAR | 307 | 02 | 3 | 13116 |
| NEF | FKLVPVDPR | 10 | 16 | GWCFKLVPVDPREVE | 224 | 10 | 16 | 13117 |
| NEF | VPLRPMTFK | 10 | 16 | RPQVPLRPMTFKOAF | 98 | 04 | 6 | 13118 |
| POL | LLDTGADDT | 63 | 98 | KEALLDTGADDTVLE | 107 | 37 | 58 | 13119 |
| POL | WMGYELHPD | 63 | 98 | PFLWMGYELHPDKWT | 415 | 60 | 94 | 13120 |
| POL | YQYNVLPQG | 63 | 98 | GTRYQYNVLPQGWKG | 330 | 52 | 81 | 13121 |
| POL | FRKYTAFTI | 61 | 97 | DKDFRKYTAFTIPSI | 310 | 10 | 16 | 13122 |
| POL | WTVNDIQKL | 62 | 97 | KDSWTVNDIQKLVGK | 438 | 43 | 67 | 13123 |
| POL | LDCTHLEGK | 61 | 95 | IWQLDCTHLEGKIIL | 812 | 29 | 45 | 13124 |
| POL | LDVGDAYFS | 61 | 95 | VTVLDVGDAYFSVPL | 295 | 50 | 78 | 13125 |
| POL | MDDLYVGSD | 6I | 95 | YQVMDDLYVGSDLEI | 370 | 57 | 89 | 13126 |
| POL | VIFAETGQE | 61 | 95 | EAEVIFAETCQETAY | 837 | 57 | 90 | 13127 |
| POL | WKGEGAVVI | 61 | 95 | KLLWKGEGAVVIQDN | 992 | 53 | 83 | 13128 |
| POL | WQLDCTHLE | 61 | 95 | PGIWQLDCTHLEGKI | 810 | 32 | 50 | 13129 |
| POL | VDFRELNKR | 60 | 94 | RKLVDFRELNKRTQD | 261 | 57 | 89 | 13130 |
| POL | WKPKMIGGI | 60 | 94 | PGKWKPKMIGGIGGF | 126 | 39 | 61 | 13131 |
| POL | IWQLDCTHL | 59 | 92 | SPGIWQLDCTHLEGK | 809 | 56 | 88 | 13132 |
| POL | VAVHVASGY | 59 | 92 | IILVAVHVASGYIEA | 824 | 26 | 41 | 13133 |
| POL | WKGSPAIFQ | 59 | 92 | PQGWKGSPAIFQSSM | 339 | 42 | 66 | 13134 |
| POL | IGGYSAGER | 58 | 91 | KGGIGGYSAGERIID | 940 | 37 | 59 | 13135 |
| POL | YALGIIQAQ | 58 | 91 | DSQYALGIIQAQPDK | 690 | 39 | 61 | 13136 |
| POL | FWEVQLGIP | 57 | 89 | TQDFWEVQLGIPHPA | 273 | 52 | 81 | 13137 |
| POL | IKKKDSTKW | 57 | 89 | VFAIKKKDSTKWRKL | 249 | 36 | 56 | 13138 |
| POL | LGIIQAQPD | 57 | 89 | QYALGIIQAQPDKSE | 692 | 39 | 61 | 13139 |
| POL | LGIPHPAGL | 56 | 89 | EVQLGIPHPAGLKKK | 278 | 51 | 80 | 13140 |
| POL | VNTPPLVKL | 57 | 89 | WEFVNTPPLVKLWYQ | 606 | 50 | 79 | 13141 |
| POL | VTVLDVGDA | 57 | 89 | KKSVTVLDVGDAYFS | 292 | 49 | 77 | 13142 |
| POL | FPISPIETV | 56 | 88 | TLNFPISPIETVPVK | 183 | 52 | 83 | 13143 |
| POL | ISPIETVPV | 56 | 88 | NFPISPIETVPVKLK | 185 | 52 | 81 | 13144 |
| POL | FVNTPPLVK | 54 | 86 | EWEFVNTPPLVKLWY | 605 | 50 | 78 | 13145 |
| POL | LNFPISPIE | 55 | 86 | GCTLNFPISPIHTVP | 181 | 53 | 83 | 13146 |
| POL | WEFVNTPPL | 54 | 86 | IPEWEFVNTPPLVKL | 603 | 49 | 77 | 13147 |
| POL | IQNPRVYYR | 52 | 84 | ITKIQNFRVYYRDSR | 969 | 32 | 51 | 13148 |
| POL | LVGPTPVNI | 54 | 84 | GTVLVGPTPVNIIGR | 160 | 51 | 80 | 13149 |
| POL | VQLGIPHPA | 54 | 84 | FWEVQLGIPHPAGLK | 276 | 53 | 83 | 13150 |
| POL | WQATWIPEW | 54 | 84 | TEYWQATWIPEWEFV | 595 | 19 | 30 | 13151 |
| POL | IETVPVKLK | 53 | 83 | ISPIETVPVKLKPGM | 188 | 51 | 80 | 13152 |
| POL | IGTYLVGPT | 53 | 83 | KKAIGTVLVGPTPVN | 156 | 22 | 34 | 13153 |
| POL | LVAVHVASG | 53 | 83 | KIILVAVHVASGYIE | 823 | 26 | 41 | 13154 |
| POL | VLVGPTPVN | 53 | 83 | IGTVLVGPTPVNIIG | 159 | 45 | 70 | 13155 |
| POL | YIEAEVIPA | 53 | 83 | ASGYIEAEVIPAETG | 832 | 52 | 81 | 13156 |
| POL | YVGSDLEIG | 53 | 83 | DDLYVGSDLEIGQHR | 374 | 52 | 81 | 13157 |
| POL | MDGPKVKQW | 52 | 81 | KPGMDGPKVKQWPLT | 199 | 47 | 73 | 13158 |
| POL | VASGYIEAE | 52 | 81 | AVHVASGYIEAEVIP | 828 | 52 | 81 | 13159 |
| POL | VOPTPVNII | 52 | 81 | TVLVUPTPVNIIGRN | 161 | 51 | 80 | 13160 |
| POL | VKQWPLTEE | 52 | 81 | GPKVKQWPLTEEKIK | 205 | 45 | 70 | 13161 |
| POL | VYYRDSRDP | 52 | 81 | NFRVYYRDSRDPIWK | 974 | 29 | 45 | 13162 |
| POL | WGFTTPDKK | 52 | 81 | LLRWGFTTPDKKHQK | 398 | 23 | 36 | 13163 |
| POL | VIYQYMDDL | 51 | 80 | PEIVIYQYMDDLYVG | 365 | 23 | 36 | 13164 |
| POL | LKKKKSVTV | 49 | 78 | PAGLKKKKSVTVLDV | 286 | 46 | 72 | 13165 |
| POL | VPRRKAKII | 50 | 78 | IKVVPRRKAKIIRDY | 1010 | 41 | 64 | 13166 |
| POL | FPQITLWQR | 49 | 77 | SFSFPQITLWQRPLV | 84 | 09 | 14 | 13167 |
| POL | VIWGKTPKF | 47 | 73 | ESIVIWGKTPKFRLP | 570 | 23 | 37 | 13168 |
| POL | YVDGAANRE | 46 | 72 | ETFYVDGAANRETKL | 630 | 24 | 38 | 13169 |
| POL | FKNLKTGKY | 45 | 70 | QEPFKNLKTGKYAKM | 535 | 15 | 23 | 13170 |
| POL | IQTKELQKQ | 45 | 70 | ATDIQTKELQKQITK | 957 | 24 | 38 | 13171 |
| POL | YGKQMAGDD | 45 | 70 | IRDYGKQMAGDDCVA | 1021 | 41 | 64 | 13172 |
| POL | WRAMASDFN | 43 | 67 | IISNWRAMASDFNLPP | 768 | 31 | 48 | 13173 |
| POL | ISKIGPENP | 42 | 66 | EGKISKIGPENPYNT | 233 | 40 | 63 | 13174 |
| POL | LTQIGCTLN | 41 | 64 | RNLLTQIGCTLNPPI | 174 | 21 | 33 | 13175 |
| POL | IIQAQPDKS | 40 | 63 | ALGIIQAQPDKSESE | 694 | 38 | 59 | 13176 |
| POL | LPEKDSWTV | 40 | 63 | PIVLPEKDSWTVNDI | 432 | 13 | 20 | 13177 |
| POL | FQSSMTKIL | 38 | 59 | PAIFQSSMTKILEPF | 346 | 32 | 50 | 13178 |
| POL | FTIPSINNE | 38 | 59 | YTAFTIPSINNETPG | 316 | 36 | 56 | 13179 |
| POL | IFQSSMTKI | 38 | 59 | SPAIFQSSMTKILEP | 345 | 33 | 52 | 13180 |
| POL | IIEQLIKKE | 37 | 58 | VSQIIEQLIKKEKVY | 710 | 19 | 30 | 13181 |
| POL | LSWVPAHKG | 37 | 58 | KVYLSWVPAHKGIGG | 722 | 23 | 37 | 13182 |
| POL | YLSWVPAHK | 37 | 58 | EKVYLSWVPAHKG1G | 721 | 15 | 24 | 13183 |
| POL | YTAFTIPSI | 37 | 58 | FRKYTAFTIPSINNE | 313 | 37 | 59 | 13184 |
| POL | IIATDIQTK | 35 | 55 | IIDIIATDIQTKELQ | 952 | 22 | 34 | 13185 |
| POL | IWKGPAKLL | 35 | 55 | RDPIWKGPAKLLWKG | 983 | 34 | 53 | 13186 |
| POL | LQKQITKIQ | 35 | 55 | TKELQKQITKIQNFR | 962 | 29 | 46 | 13187 |
| POL | LKEALLDTG | 34 | 53 | GGQLKEALLDTGADD | 103 | 31 | 48 | 13188 |
| POL | VYLSWVPAH | 33 | 52 | KEKVYLSWVPAHKGI | 720 | 15 | 23 | 13189 |
| POL | FILKLAGRW | 32 | 50 | TAYFILKLAGRWPVK | 849 | 27 | 42 | 13190 |
| POL | LEGKIILVA | 31 | 48 | CTHLEGKIILVAVHV | 817 | 30 | 47 | 13191 |
| POL | YFILKLAGR | 31 | 48 | ETAYFILKLAGRWPV | 848 | 30 | 47 | 13192 |
| POL | IILVAVHVA | 30 | 47 | EGKIILVAVHVASGY | 821 | 30 | 47 | 13193 |
| POL | IWGKTPKFR | 30 | 47 | SIVIWGKTPKFRLPI | 571 | 22 | 34 | 13194 |
| POL | LAGRWPVKV | 30 | 47 | ILKLAGRWPVKVIHT | 853 | 19 | 30 | 13195 |
| POL | VVAKEIVAS | 30 | 47 | LPPVVAKEIVASCDK | 780 | 21 | 33 | 13196 |
| POL | IDIIATDIQ | 29 | 45 | ERIIDIIATDIQTKE | 950 | 22 | 34 | 13197 |
| POL | IIDITATDI | 29 | 45 | GERIIDIIATDTQTK | 949 | 23 | 36 | 13198 |
| POL | IIGRNMLTQ | 29 | 45 | PVNIIGRNMLTQLGC | 168 | 11 | 17 | 13199 |
| POL | IKVKQLCKL | 29 | 45 | YAGIKVKQLCKLLRG | 460 | 18 | 28 | 13200 |
| POL | VDKLVSSGI | 29 | 45 | NEQVDKLVSSGIRKV | 737 | 26 | 41 | 13201 |
| POL | IVGAETFYV | 28 | 44 | KEPIVGAETFYVDGA | 623 | 16 | 25 | 13202 |
| POL | LPPVVAKEI | 28 | 44 | DFNLPPVVAKEIVAS | 777 | 26 | 41 | 13203 |
| POL | WTVQPIQLP | 28 | 44 | PDKWTVQPIQLPEKD | 425 | 13 | 20 | 13204 |
| POL | FNLPPVVAK | 27 | 42 | ASDFNLPPVVAKEIV | 775 | 25 | 39 | 13205 |
| POL | FTSAAVKAA | 27 | 42 | GSNFTSAAVKAACWW | 870 | 25 | 39 | 13206 |
| POL | LALQDSGLE | 27 | 42 | AIHLALQDSOLEVNI | 673 | 15 | 23 | 13207 |
| POL | LPPIVAKEI | 27 | 42 | DFNLPPIVAKBIVAS | 777 | 20 | 31 | 13208 |
| POL | LQDSGLEVN | 27 | 42 | HLALQDSGLEVNIVT | 675 | 13 | 20 | 13209 |
| POL | FNLPPTVAK | 26 | 41 | ASDFNLPPIVAKEIV | 775 | 21 | 33 | 13210 |
| POL | IGQHRAKIE | 26 | 41 | DLEIGQIIRAKIEELR | 381 | 23 | 36 | 13211 |
| POL | IIGRNLLTQ | 26 | 41 | PVNIIGRNLLTQIGC | 168 | 21 | 33 | 13212 |
| POL | LEVNIVTDS | 26 | 41 | DSGLEVNIVTDSQYA | 680 | 26 | 41 | 13213 |
| POL | LRGAKALTD | 26 | 41 | CKLLRGAKALTDIVP | 469 | 12 | 19 | 13214 |
| POL | LVSSGIRKV | 26 | 41 | VDKLVSSGIRKVLFL | 740 | 25 | 39 | 13215 |
| POL | FLLKLAGRW | 25 | 39 | TAYFLLKLAGRWPVK | 849 | 19 | 30 | 13216 |
| POL | LALQDSGSE | 25 | 39 | AIIILALQDSGSEVNI | 673 | 08 | 13 | 13217 |
| POL | LQDSGSEVN | 25 | 39 | HLALQDSGSEVNIVT | 675 | 08 | 13 | 13218 |
| POL | VKVIHTDNG | 25 | 39 | RWPVKVIHTDNGSNF | 859 | 21 | 33 | 13219 |
| POL | WPVKVIHTD | 25 | 39 | AGRWPVKVIIITDNGS | 857 | 20 | 31 | 13220 |
| POL | YFLLKLAGR | 25 | 39 | ETAYFLLKLAGRWPV | 848 | 24 | 38 | 13221 |
| POL | ICGKKAIGT | 24 | 38 | LIEICGKKAIGTVLV | 150 | 12 | 19 | 13222 |
| POL | IVAKEIVAS | 24 | 38 | LPPIVAKEIVASCDK | 780 | 22 | 34 | 13223 |
| POL | LRWGFTTPD | 24 | 38 | QHLLRWGFTTPDKKH | 396 | 12 | 19 | 13224 |
| POL | LEGKVILVA | 23 | 36 | CTHLEGKVILVAVHV | 817 | 23 | 36 | 13225 |
| POL | LKWGFTTPD | 23 | 36 | EIILLKWGFTTPDKKH | 396 | 13 | 20 | 13226 |
| POL | VILVAVIVA | 23 | 36 | EGKVILVAVHVASGY | 821 | 21 | 33 | 13227 |
| POL | LAWVPAHKG | 22 | 34 | KVYLAWVPAHKGIGG | 722 | 20 | 32 | 13228 |
| POL | YDQILIEIC | 22 | 34 | VRQYDQILIEICGKK | 143 | 08 | 13 | 13229 |
| POL | YLAWVPAHK | 22 | 34 | EKVYLAWVPAHKGIG | 721 | 20 | 32 | 13230 |
| POL | IGQHRTKIE | 21 | 33 | DLEIGQIIRTKIEELR | 381 | 19 | 30 | 13231 |
| POL | IGRNLLTQI | 21 | 33 | VNIIGRNLLTQIGCT | 169 | 21 | 33 | 13232 |
| POL | LWQRPLVTI | 21 | 33 | QITLWQRPLVTIKIG | 89 | 11 | 17 | 13233 |
| POL | VSLTETTNQ | 21 | 33 | QKVVSLTETTNQKTE | 656 | 10 | 16 | 13234 |
| POL | VYLAWVPAH | 21 | 33 | KEKVYLAWVPAHKGI | 720 | 20 | 31 | 13235 |
| POL | ICGHKAIGT | 20 | 31 | LIEICGHKAIGTVLV | 150 | 10 | 16 | 13236 |
| POL | LRGTKALTE | 19 | 30 | CKLLRGTKALTEVIP | 469 | 11 | 17 | 13237 |
| POL | LVNQIIEQL | 19 | 30 | ESELVNQIIEQLIKK | 706 | 13 | 20 | 13238 |
| POL | LVSQIIEQL | 19 | 30 | ESELVSQIIEQLIKK | 706 | 18 | 28 | 13239 |
| POL | YFSVPLDKD | 18 | 29 | GDAYFSVPLDKDFRK | 301 | 18 | 28 | 13240 |
| POL | IGRNMLTQI | 18 | 28 | VNIIGRNMLTQIGCT | 169 | 12 | 19 | 13241 |
| POL | IKVRQLCKL | 18 | 28 | YPGIKVRQLCKLLRG | 460 | 13 | 20 | 13242 |
| POL | LWKGPAKLL | 18 | 28 | RDPLWKGPAKLLWKG | 983 | 13 | 20 | 13243 |
| POL | LWQRPLVTV | 18 | 28 | QITLWQRPLVTVKIG | 89 | 09 | 14 | 13244 |
| POL | YAGIKVKQL | 18 | 28 | SQLYAGIKVKQLCKL | 457 | 18 | 28 | 13245 |
| POL | IWGKTPKFK | 17 | 27 | SIVIWGKTPKFKLPI | 571 | 17 | 27 | 13246 |
| POL | LREHLLKWG | 17 | 27 | IEELREHLLKWGFTI | 391 | 12 | 19 | 13247 |
| POL | VQPIQLPEK | 17 | 27 | KWTVQPIQLPEKDSW | 427 | 13 | 20 | 13248 |
| POL | WQRPLVTIK | 17 | 27 | ITLWQRPLVTIKIGG | 90 | 11 | 17 | 13249 |
| POL | IIQAQPDRS | 16 | 25 | ALGIIQAQPDRSESF | 694 | 12 | 19 | 13250 |
| POL | LQAIHLALQ | 16 | 25 | KTELQAIHLALQDSG | 668 | 15 | 23 | 13251 |
| POL | LVEICTEME | 15 | 24 | IKALVEICTEMEKEG | 218 | 15 | 23 | 13252 |
| POL | LRQHLLRWG | 15 | 23 | IEELRQHLLRWGITT | 391 | 12 | 19 | 13253 |
| POL | LTQLGCTLN | 15 | 23 | RNMLTQLGCTLNFPI | 174 | 10 | 16 | 13254 |
| POL | LYSAGIRKY | 15 | 23 | VDKLVSAGIRKVLFL | 740 | 14 | 22 | 13255 |
| POL | VDKLVSAGI | 15 | 23 | NEQVDKLVSAGIRKV | 737 | 24 | 22 | 13256 |
| POL | YPGIKVRQL | 15 | 23 | SQIYPGIKVRQLCKL | 457 | 12 | 19 | 13257 |
| POL | FRKQNPDIV | 14 | 22 | LEPFRKQNPDIVIYQ | 357 | 14 | 22 | 13258 |
| POL | FSFPQITLW | 14 | 22 | TVSFSFPQITLWQRP | 77 | 05 | 10 | 13259 |
| POL | FTSITVKAA | 14 | 22 | GSNFTSITVKAACWW | 870 | 11 | 17 | 13260 |
| POL | IIASDTQTK | 14 | 22 | IIDIIASDIQTKELQ | 952 | 11 | 17 | 13261 |
| POL | LAGRWPVKT | 14 | 22 | LLKLAGRWPVKTIHT | 853 | 09 | 14 | 13262 |
| POL | VQKIATESI | 14 | 22 | TEAVQKIATESIVIW | 561 | 10 | 16 | 13263 |
| POL | FTIPSTNNE | 13 | 20 | YTAFTIPSTNNETPG | 316 | 13 | 20 | 13264 |
| POL | LEDINLPGK | 13 | 20 | DTVLEDINLPGKWKP | 117 | 13 | 20 | 13265 |
| POL | LTDIVPLTE | 13 | 20 | AKALTDIVPLTEEAE | 475 | 08 | 13 | 13266 |
| POL | LVTIKIGGQ | 13 | 20 | QRPLVTIKIGGQLKE | 94 | 13 | 20 | 13267 |
| POL | MRGAHTNDV | 13 | 20 | YARMRGAHTNDVKQL | 546 | 12 | 19 | 13268 |
| POL | VKTIHTDNG | 13 | 20 | RWPVKTIHTDNGSNF | 859 | 09 | 14 | 13269 |
| POL | VQPIVLPEK | 13 | 20 | KWTVQPIVLPEKDSW | 427 | 12 | 19 | 13270 |
| POL | WPVKTIHTD | 13 | 20 | AGRWPVKTIHTDNGS | 857 | 09 | 14 | 13271 |
| POL | WQRPLVTVK | 13 | 20 | ITLWQRPLVTVKIGG | 90 | 09 | 14 | 13272 |
| POL | WTVQPIVLP | 23 | 20 | PDKWTVQPIVLPEKD | 425 | 12 | 19 | 13273 |
| POL | YTAFTIPST | 13 | 20 | PRKYTAFTIPSTNNE | 313 | 13 | 21 | 13274 |
| POL | IDIIASDIQ | 12 | 19 | ERIIDIIASDIQTKE | 950 | 12 | 17 | 13275 |
| POL | IIDIIASDI | 12 | 19 | GERIIDIIASDIQTK | 949 | 12 | 17 | 13276 |
| POL | TVDIIATDI | 12 | 19 | GERIVDIIATDIQTK | 949 | 10 | 16 | 13277 |
| POL | LEEINLPGK | 12 | 19 | DTVLEEINLPGKWKP | 117 | 11 | 17 | 13278 |
| POL | LQAIYLALQ | 12 | 19 | KTELQAIYLALQDSG | 668 | 11 | 17 | 13279 |
| POL | LQKQIIKIQ | 12 | 19 | TKELQKQIIKIQNFR | 962 | 09 | 14 | 13280 |
| POL | VDIIATDIQ | 12 | 19 | ERIVDIIATDLQTKE | 950 | 10 | 16 | 13281 |
| POL | YDQIPIEIC | 12 | 19 | VRQYDQTPIEICGKK | 143 | 05 | 8 | 13282 |
| POL | FNFPQITLW | 12 | 17 | VPTFNFPQITLWQRP | 79 | 02 | 17 | 13283 |
| POL | IGRNMLTQL | 12 | 17 | VNIIGRNMLTQLOCT | 169 | 10 | 16 | 13284 |
| POL | ISRIGPENP | 11 | 17 | EGKISRIGPENPYNT | 233 | 10 | 16 | 13285 |
| POL | LTEVIPLTE | 12 | 17 | TKALTEVIPLTEEAE | 475 | 10 | 16 | 13286 |
| POL | MESIVIWGK | 11 | 17 | KIAMESIVIWGKTPK | 566 | 07 | 11 | 13287 |
| POL | VPRRKVKII | 11 | 17 | IKVVPRRKVKIIRDY | 1010 | 08 | 13 | 13288 |
| POL | VSFSFPQIT | 08 | 17 | QGTVSFSFPQITLWQ | 75 | 05 | 8 | 13289 |
| POL | WYQLETEPI | 11 | 17 | VKLWYQLETEPIVGA | 615 | 04 | 6 | 13290 |
| POL | YPGIKVKQL | 11 | 17 | SQIYPGIKVKQLCKL | 457 | 09 | 14 | 13291 |
| POL | FPQGEAREF | 10 | 16 | NLAFPQGEAREFPPE | 5 | 05 | 8 | 13292 |
| POL | LIEALLDTG | 10 | 16 | GGQLIEALLDTGADD | 103 | 09 | 14 | 13293 |
| POL | VSLTDTTNQ | 10 | 16 | QKVVSLTDTTNQKTE | 656 | 09 | 14 | 13294 |
| POL | WETWWTDYW | 10 | 16 | KETWETWWTDYWQAT | 587 | 09 | 14 | 13295 |
| POL | YAKMRTAIT | 10 | 16 | TGKYAKMRTAHTNDV | 543 | 09 | 14 | 13296 |
| POL | YKNLKTGKY | 10 | 16 | QEPYKNLKTGKYARM | 535 | 03 | 5 | 13297 |
| REV | LQLPPLERL | 36 | 56 | PVPLQLPPLERLTLD | 74 | 13 | 20 | 13298 |
| REV | VPLQLPPLE | 36 | 56 | AEPVPLQLPPLERLT | 72 | 10 | 16 | 13299 |
| REV | LYQSNPPPS | 18 | 28 | IKFLYQSNPPPSPEG | 21 | 04 | 6 | 13300 |
| REV | VRIIKILYQ | 16 | 25 | LKAVRIIKILYQSNP | 13 | 06 | 9 | 13302 |
| REV | YQSNPPPSP | 12 | 19 | KPLYQSNPPPSPEGT | 22 | 05 | 8 | 13302 |
| REV | LQLPPIERL | 11 | 17 | PVPLQLPPIERLRLD | 74 | 04 | 6 | 13303 |
| REV | VPLQLPPIE | 12 | 17 | AEPVPLQLPPIERLR | 72 | 04 | 6 | 13304 |
| TAT | WNHPGSQPK | 15 | 23 | LEPWNIIPGSQPKTAC | 11 | 11 | 17 | 13305 |
| TAT | FLNKGLGIS | 14 | 22 | QVCFLNKGLGISYGR | 38 | 04 | 6 | 13306 |
| TAT | WKHPGSQPK | 13 | 20 | LEPWKHPGSQPKTAC | 11 | 11 | 17 | 13307 |
| TAT | YCKKCCFHC | 11 | 17 | NNCYCKKCCFIICQVC | 26 | 04 | 6 | 13308 |
| TAT | YCKKCCYHC | 11 | 17 | TNCYCKKCCYHCQVC | 26 | 02 | 3 | 13309 |
| TAT | WNHPGSQPT | 10 | 16 | LEPWNHPGSQPTTAC | 11 | 07 | 11 | 13310 |
| VIF | MIVWQVDRM | 46 | 72 | WQVMIVWQVDRMRIR | 5 | 28 | 44 | 13311 |
| VIF | WQVMIVWQV | 43 | 67 | ENRWQVMIVWQVDRM | 2 | 41 | 64 | 13312 |
| VIF | WQVDRMRIR | 34 | 53 | MIVWQVDRMRIRTWK | 8 | 14 | 22 | 13313 |
| VIF | LQYLALTAL | 33 | 52 | VGSLQYLALTALIKP | 147 | 14 | 22 | 13314 |
| VIF | LGHGVSIEW | 31 | 48 | DWHLGHGVSTEWRLR | 81 | 11 | 17 | 13315 |
| VIF | VDRMRIRTW | 31 | 48 | VWQVDRMRIRTWNSL | 10 | 15 | 23 | 13316 |
| VIF | YFDCFSESA | 28 | 44 | HLYYFDCFSESAIRN | 113 | 08 | 13 | 13317 |
| VIF | YWGLHTGER | 28 | 44 | ITTYWGLHTGERDWH | 68 | 14 | 22 | 13318 |
| VIF | IRTWNSLVK | 27 | 42 | RMRIRTWNSLVKHHM | 15 | 12 | 19 | 13319 |
| VIF | LGQGVSIEW | 26 | 41 | DWHLGQGVSIEWRKK | 81 | 07 | 11 | 13320 |
| VIF | LVKHHMYVS | 21 | 33 | WNSLVKHHMYVSKKA | 21 | 07 | 11 | 13321 |
| VIF | IPLGEARLV | 19 | 30 | EVIIIPLGEARLVVRT | 54 | 05 | 8 | 13322 |
| VIF | LVKHHMYIS | 19 | 30 | WKSLVKHIIMYISGKA | 21 | 05 | 8 | 13323 |
| VIF | YLALTALIK | 16 | 25 | SLQYLALTALIKPKK | 149 | 11 | 17 | 13324 |
| VIF | IRTWKSLVK | 15 | 23 | RMRIRTWKSLVKHHM | 15 | 14 | 22 | 13325 |
| VIF | LADQLIHLY | 15 | 23 | DPDLADQLIHLYYFD | 104 | 07 | 11 | 13326 |
| VIF | LALTALIKP | 15 | 23 | LQYLALTALIKPKKI | 150 | 08 | 13 | 13327 |
| VIF | VDPGLADQL | 15 | 23 | STQVDPGLADQLIHL | 100 | 04 | 6 | 13328 |
| VIF | LYYFDCFSE | 14 | 22 | LIIILYYFDCFSESAI | 111 | 14 | 22 | 13329 |
| VIF | FSESAIRKA | 13 | 20 | FDCPSESAIRKAILG | 117 | 10 | 16 | 13330 |
| VIF | LADQLIHMH | 13 | 20 | EPGLADQLIHMIIYFD | 104 | 08 | 13 | 13331 |
| VIF | WQVDRMKIR | 13 | 20 | LIVWQVDRMKIRTWN | 8 | 09 | 14 | 13332 |
| VIF | PSDSAIRKA | 12 | 19 | PDCPSDSAIRKAILG | 117 | 05 | 8 | 13333 |
| VIF | PSESAIRNA | 12 | 19 | PDCFSESAIRNAILG | 117 | 12 | 19 | 13334 |
| VIF | IVSPRCEYQ | 12 | 19 | LGHIVSPRCEYQAGH | 130 | 06 | 9 | 13335 |
| VIF | LQYLALAAL | 12 | 19 | VGSLQYLALAALITP | 147 | 04 | 6 | 13336 |
| VIF | VDRMKIRTW | 12 | 19 | VWQVDRMKIRTWNSL | 10 | 12 | 19 | 13337 |
| VIF | YWGLQTGER | 12 | 19 | IKTYWGLQTGERDWH | 68 | 08 | 13 | 13338 |
| VIF | IPLGDARLV | 11 | 17 | EVHIPLGDARLVITT | 54 | 06 | 9 | 13339 |
| VIF | LQYLALKAL | 11 | 17 | VGSLQYLALKALVTP | 147 | 08 | 13 | 13340 |
| VIF | WQVDRMRIN | 11 | 17 | MIVWQVDRMRINTWK | 8 | 08 | 13 | 13343 |
| VIF | IKPKKIKPP | 10 | 16 | TALIKPKKIKPPLPS | 156 | 08 | 13 | 13342 |
| VIF | VDRMRINTW | 10 | 16 | VWQVDRMRINTWKSL | 10 | 09 | 14 | 13343 |
| VPR | IGCQHSRIG | 46 | 72 | HFRIGCQHSRIGITR | 71 | 08 | 13 | 13344 |
| VPR | WTLELLEEL | 42 | 69 | YNEWTLELLEELKSE | 15 | 12 | 19 | 13345 |
| VPR | ILQQLLFIH | 37 | 58 | IIRILQQLLFIHPRI | 60 | 31 | 48 | 13346 |
| VPR | PIHFRIGCQ | 30 | 47 | QLLFIHFRIGCQHSR | 66 | 29 | 45 | 13347 |
| VPR | YNEWTLELL | 30 | 47 | REPYNEWTLELLEEL | 12 | 27 | 42 | 13348 |
| VPR | FPRPWLHGL | 24 | 38 | VRHPPRPWLHGLGQH | 31 | 12 | 19 | 13349 |
| VPR | WEGVEAIIR | 18 | 28 | GDTWEGVEAIIRILQ | 51 | 14 | 22 | 13350 |
| VPR | LEELKSEAV | 16 | 25 | LELLEELKSEAVRHF | 20 | 15 | 23 | 13351 |
| VPR | WAGVEAIIR | 16 | 25 | GDTWAOVEAIIRILQ | 51 | 15 | 23 | 13352 |
| VPR | YGDTWAGVE | 16 | 25 | YETYGDTWAGVEAII | 47 | 16 | 25 | 13353 |
| VPR | IGCRHSRIG | 12 | 19 | HPRIGCRHSRTGITR | 71 | 03 | 5 | 13354 |
| VPR | FIHPRIGCR | 11 | 17 | QLLPIHPRIGCRHSR | 66 | 11 | 17 | 13355 |
| VPR | FVHPRIGCQ | 11 | 17 | QLLFVHPRIGCQHSR | 66 | 10 | 16 | 13356 |
| VPR | YGDTWTGVE | 11 | 17 | YETYGDTWTGVEAII | 47 | 04 | 6 | 13357 |
| VPR | FPRIWLHSL | 10 | 16 | VRIIPPRIWLHSLGQH | 31 | 05 | 8 | 13358 |
| VPR | WALELLEEL | 09 | 15 | YNEWALELLEELKNE | 15 | 03 | 5 | 13359 |
| VPU | LVTLLSSSK | 01 | 50 | EEWLVTLLSSSKLDQ | 87 | 01 | 2 | 13360 |
| VPU | VTLLSSSKL | 01 | 50 | EWLVTLLSSSKLDQG | 89 | 01 | 2 | 13361 |
| VPU | IIAIVVWTI | 23 | 36 | VVAIIAIVVWTIVFI | 20 | 02 | 3 | 13362 |
| VPU | VGYRIVIVA | 01 | 33 | LAKVDYRIVIVAPIV | 5 | 01 | 25 | 13363 |
| VPU | LRQRKIDRL | 17 | 27 | RKILRQRKIDRLIDR | 44 | 11 | 17 | 13364 |
| VPU | IVVWTIVFI | 15 | 23 | IIAIVVWTIVFIEYR | 27 | 07 | 11 | 13365 |
| VPU | VVWTIVFIE | 14 | 22 | IAIVVWTIVFIEYRK | 28 | 06 | 9 | 13366 |
| VPU | IEYRKILRQ | 13 | 21 | IVFIEYRKILRQRKI | 36 | 07 | 11 | 13367 |
| VPU | ILAIVALVV | 11 | 17 | SLYILAIVALVVAII | 3 | 01 | 2 | 13368 |
| VPU | WTIVFIEYR | 10 | 16 | IVVWTIVPIEYRKIL | 30 | 05 | 8 | 13369 |
| VPU | LAIVALVVA | 09 | 15 | LQILAIVALVVAGII | 4 | 02 | 3 | 13370 |

[0400] TABLE XIXb
HIV DR Super Motif Peptides with Binding Information

| Core | | | | | | | | | | | | | | | |
|---|---|---|---|---|---|---|---|---|---|---|---|---|---|---|---|
| Sequence | Exemplary Sequence | DR1 | DR2 wβ1 | DR2w2β2 | DR3 | DR4w4 | DR4w15 | DR5w11 | DR5w12 | DR6w19 | DR7 | DR8w2 | DR9 | DRw53 | SEQ ID NO. |
| VSTQLLLNG | KPVVSTQLLLNGSLA | | | | | | | | | | | | | | 12864 |
| VVSTQLLLN | IKPVVSTQLLLNGSL | | | | | | | | | | | | | | 12865 |
| LTVWGIKQL | LLQLTVWGIKQLQAR | 0.0840 | | 0.0096 | | 0.0190 | | 0.0750 | | | 0.0180 | | | | 12866 |
| LLSGIVQQQ | ARQLLSGIVQQQSNL | | | | | | | | | | | | | | 12867 |
| WATHACVPT | HNVWATHACVPTDPN | | | | | | | | | | | | | | 12868 |
| LGAAGSTMG | LGFLGAAGSTMGAAS | | | | | | | | | | | | | | 12869 |
| VRQGYSPLS | VNRVRQGYSPLSFQT | 0.0032 | | −0.0014 | | 0.0230 | | −0.0010 | | | −0.0007 | | | | 12870 |
| LLLNGSLAE | STQLLLNGSLAEEEV | | | | | | | | | | | | | | 12871 |
| VKLTPLCVT | KPCVKLTPLCVTLNC | | | | | | | | | | | | | | 12872 |
| LRAIEAQQH | NNLLRAIEAQQIILLQ | 0.0280 | | | | 0.0150 | | | | | 0.0150 | | | | 12873 |
| VSTVQCTHG | CKNVSTVQCTHGIKP | | | | | | | | | | | | | | 12874 |
| LGIWGCSGK | QQLLGIWGCSGKLIC | | | | | | | | | | | | | | 12875 |
| LWDQSLKPC | IISLWDQSLKPCVKL | 0.0057 | | 0.0061 | | 0.0096 | | 0.0059 | | | 0.0012 | | | | 12876 |
| LGFLGAAGS | AVFLGFLGAAGSTMG | | | | | | | | | | | | | | 12877 |
| VWATHACVP | VHNVWATHACVPTDP | | | | | | | | | | | | | | 12878 |
| WGIKQLQAR | LTVWGIKQLQARVLA | | | | | | | | | | | | | | 12879 |
| LWYIKIFIM | TNWLWYIKIFIMIVG | | | | | | | | | | | | | | 12880 |
| FCASDAKAY | TILFCASDAKAYDTE | | | | | | | | | | | | | | 12881 |
| IVGGLTGLR | FIMIVGGLIGLRIVF | | | | | | | | | | | | | | 12882 |
| IFIMIYGGL | YIKIFIMIVGGLIGL | | | | | | | | | | | | | | 12883 |
| VYYGVPVWK | WVTVYYGVPVWKEAT | 0.0790 | 6.1000 | 0.0700 | 0.0043 | 0.0180 | 8.2000 | 0.0010 | 0.0098 | −0.0004 | 0.0310 | 0.0049 | 0.4600 | | 12884 |
| IKQLQARVL | VWGIKQLQARVLAVE | | | | | | | | | | | | | | 12885 |
| IKIPIMIVG | LWYIKIPIMIVGGLI | | | | | | | | | | | | | | 12886 |
| MGAASITLT | GSTMGAASITLTVQA | | | | | | | | | | | | | | 12887 |
| YKIFINTIV | WLWYIKIFIMIVGGL | | | | | | | | | | | | | | 12888 |
| ITGLLLTRD | SSNITGLLLTRDGGK | | | | | | | | | | | | | | 12889 |
| IPIHYCAPA | FEPIPIHYCAPAGFA | | | | | | | | | | | | | | 12890 |
| MIVGGLIGL | IFIMIVGGLIGLRIV | | | | | | | | | | | | | | 12891 |
| VQARQLLSG | TLTVQARQLLSOIVQ | | | | | | | | | | | | | | 12892 |
| FEPIPIHYC | KVSFEPIPIHYCAPA | | | | | | | | | | | | | | 12893 |
| LRSLCLFSY | WDDLRSLCLPSYHRL | | | | | | | | | | | | | | 12894 |
| MWKNNMVEQ | NFNMWKNNMVEQMHE | | | | | | | | | | | | | | 12895 |
| VHWVWATHA | DTEVHNVWATHACVP | | | | | | | | | | | | | | 12896 |
| WKNNMVEQM | FNMWKNNMVEQMNED | | | | | | | | | | | | | | 12897 |
| YYGVPVWKE | VTVYYGVPVWKEATI | 0.0087 | | 0.0270 | | 0.0071 | | 0.0021 | | | 0.0160 | | | | 12898 |
| LLQLTVWGI | QQHLLQLTVWGTKQL | 1.1000 | 0.7500 | 0.0580 | −0.0043 | 0.0330 | 0.2700 | 0.0036 | 0.4900 | 0.0180 | 0.3900 | 0.0210 | 0.5100 | | 12899 |
| IEPLGVAPT | VVKIEPLGVAPTKAK | | | | | | | | | | | | | | 12900 |
| IKPVVSTQL | THGIKPVVSTQLLLN | | | | | | | | | | | | | | 12901 |
| LQARVLAVE | IKQLQARVLAVERYL | | | | | | | | | | | | | | 12902 |
| WDDLRSLCL | ALAWDDLRSLCLFSY | | | | | | | | | | | | | | 12903 |
| ITNIHTPHR | SRPIINIHTPHREKR | | | | | | | | | | | | | | 12904 |
| INIHTPHRE | RPHNIIITPHREKRA | | | | | | | | | | | | | | 12905 |
| ITQACPKVS | TSVITQACPKVSFEP | | | | | | | | | | | | | | 12906 |
| IVQQQSNLL | LSGIVQQQSNLLRAI | | | | | | | | | | | | | | 12907 |
| LGNNSTNST | NKTLGNNSTNSTLGN | | | | | | | | | | | | | | 12908 |
| VISTRTHRE | ARPVISTRTHRBKRA | | | | | | | | | | | | | | 12909 |
| WRWGTLFLG | QNLWRWGTLFLGMLM | | | | | | | | | | | | | | 12910 |
| WRWGTMLLG | QHLWRWGTMLLGMLM | | | | | | | | | | | | | | 12911 |
| FAVLSIVNR | RIVFAVLSIVHRVRQ | | | | | | | | | | | | | | 12912 |
| LLNGSLAEE | TQLLLNGSLABEEVV | | | | | | | | | | | | | | 12913 |
| LTPLCVTLN | CVKLTPLCVTLNCTD | | | | | | | | | | | | | | 12914 |
| LYKYKVVKI | RSELYKYKVVKIEPL | 0.0066 | 0.0320 | 0.0014 | | 0.0011 | 0.0190 | 0.0042 | | 0.0100 | 0.1800 | 0.1100 | 0.1700 | | 12915 |
| VPWNSSWSN | TTNVPWNSSWSNKSL | | | | | | | | | | | | | | 12916 |
| YRLINCNTS | YKEYRLINCNTSAIT | | | | | | | | | | | | | | 12917 |
| IIIYCAPAGF | PIPIHYCAPAGFAIL | | | | | | | | | | | | | | 12918 |
| LKDQQLLGI | ERYLKDQQLLGIWGC | | | | | | | | | | | | | | 12919 |
| YKYKVVKIE | SELYKYKVVKIEPLG | | | | | | | | | | | | | | 12920 |
| IRPVVSTQL | TIIGIRPVVSTQLLLN | | | | | | | | | | | | | | 12921 |
| LDKWASLWN | LLALDKWASLWNWFD | | | | | | | | | | | | | | 12922 |
| LRIVFAVLS | LIGLRIVPAVLSIVN | | | | | | | | | | | | | | 12923 |
| LNGSLAEEE | QLLLNGSLAEEEVVI | | | | | | | | | | | | | | 12924 |
| YKVVKJEPL | LYKYKVVKIEPLGVA | | | | | | | | | | | | | | 12925 |
| LKGLRLGWE | RSSLKGLRLGWEGLK | | | | | | | | | | | | | | 12926 |
| FSYHRLRDL | LCLFSYHRLRDLLLI | | | | | | | | | | | | | | 12927 |
| INCTRPNNN | SVELNCTRPNNNTRK | | | | | | | | | | | | | | 12928 |
| VVKIEPLGV | KYKVVKIEPLGVAPT | | | | | | | | | | | | | | 12929 |
| WKEATTTLF | VPVWKEATTTLFCAS | 0.0260 | −0.0002 | 0.0520 | −0.0030 | 0.1100 | 0.0900 | 0.0021 | −0.0045 | 0.0004 | 0.0630 | 0.0086 | 0.4700 | | 12930 |
| IGLRIVFAV | GGLIGLRIVFAVLSI | | | | | | | | | | | | | | 12931 |
| FPYCNTSGL | GGEFFYCNTSGLENS | | | | | | | | | | | | | | 12932 |
| FGLGALFLG | RAAFGLGALFLGFLG | | | | | | | | | | | | | | 12933 |
| FYCNTSGLF | GEFFYCNTSGLFNST | | | | | | | | | | | | | | 12934 |
| LIGLRIVFA | VGGLIGLRIVFAVLS | | | | | | | | | | | | | | 12935 |
| VGLGAVFLG | KRAVGLGAVFLGFLG | | | | | | | | | | | | | | 12936 |
| VGLGMLELG | KRAVGLGMLFLGVLS | | | | | | | | | | | | | | 12937 |
| ICTTAVPWN | GKLICTTAVPWNSSW | | | | | | | | | | | | | | 12938 |
| ICITNVPWN | GKLICTTNVPWNSSW | | | | | | | | | | | | | | 12939 |
| LGVAPTKAK | IEPLGVAPTKAKRRV | | | | | | | | | | | | | | 12940 |
| LICTTAVPW | SGKLICTTAVPWNSS | | | | | | | | | | | | | | 12941 |
| LRDQQLLGI | ERYLRDQQLLGIWGC | | | | | | | | | | | | | | 12942 |
| VFLGFLGAA | LGAVFLGFLGAAGST | | | | | | | | | | | | | | 12943 |
| FSYHRLRDF | LCLFSYIIRLRDFILI | | | | | | | | | | | | | | 12944 |
| IPIHYCTPA | FEPIPIHYCTPAGFA | | | | | | | | | | | | | | 12945 |
| IVFAVLSIV | GLRIVFAVLSIVNRV | | | | | | | | | | | | | | 12946 |
| VFAVLSIVN | LRIVFAVLSIVNRVR | | | | | | | | | | | | | | 12947 |
| VPWNASWSN | TTAVPWNASWSNKSL | | | | | | | | | | | | | | 12948 |
| IGLRIIFAV | GGLIGLRIIFAVLSI | | | | | | | | | | | | | | 12949 |
| IRQAHCNIS | IGDIRQAHCNISRAK | | | | | | | | | | | | | | 12950 |
| VAPTKAKRR | PLGVAPTKAKRRVVQ | | | | | | | | | | | | | | 12951 |
| FNGTGPCKN | DKKFNGTGPCKNVST | | | | | | | | | | | | | | 12952 |
| IGPGQTFYA | SVRIGPGQTFYATGD | | | | | | | | | | | | | | 12953 |
| IGSGQAFYV | RYSIGSGQAFYVTGK | | | | | | | | | | | | | | 12954 |
| IRYLNLVNQ | QTAIRYLNLVNQTEN | | | | | | | | | | | | | | 12955 |
| LIGLRIIFA | VGGLIGLRIIFAVLS | | | | | | | | | | | | | | 12956 |
| LLQYWSQEL | WWNLLQYWSQELKNS | | | | | | | | | | | | | | 12957 |
| LRNLCLFSY | WDDLRNLCLFSYHRL | | | | | | | | | | | | | | 12958 |
| LYSGELALA | SIRLVSGFLALAWDD | | | | | | | | | | | | | | 12959 |
| VSGFLALAW | IRLVSGFLALAWDDL | | | | | | | | | | | | | | 12960 |
| FDPYPIHYC | KVTFDPIPIHYCTPA | | | | | | | | | | | | | | 12961 |
| IIFAVLSIV | GLRIIFAVLSIVNRV | | | | | | | | | | | | | | 12962 |
| LINCNTSAI | EYRLINCNTSAITQA | | | | | | | | | | | | | | 12963 |
| LLNATAIAV | AVSLLNATAIAVAEG | | | | | | | | | | | | | | 12964 |
| LRIIFAVLS | LIGLRIIFAVLSIVN | | | | | | | | | | | | | | 12965 |
| VITQACPKV | NTSVITQACPKVSFE | | | | | | | | | | | | | | 12966 |
| YWWNLLQYW | VLKYWWNLLQYWSQE | | | | | | | | | | | | | | 12967 |
| FAILKCNDK | PAGFAILKCNDKKFN | | | | | | | | | | | | | | 12968 |
| IFAVLSIVN | LRIIFAVLSIVNRVR | | | | | | | | | | | | | | 12969 |
| INCNTSAIT | YRLINCNTSALTQAC | | | | | | | | | | | | | | 12970 |
| LNATAIAVA | VSLLNATAIAVAEGT | | | | | | | | | | | | | | 12971 |
| WNSSWSNKS | NVPWNSSWSNKSLDE | | | | | | | | | | | | | | 12972 |
| WNASWSNKS | NVPWNASWSNKSYED | | | | | | | | | | | | | | 12973 |
| ICITIVPWN | GKLICITTVPWNASW | | | | | | | | | | | | | | 12974 |
| LLKLTVWGI | QQHLLKLTVWGIKQL | | | | | | | | | | | | | | 12975 |
| LYKYKVVEI | RSELYKYKVVEIKPL | | | | | | | | | | | | | | 12976 |
| MFLGFLGAA | LGAMFLGFLGAAGST | | | | | | | | | | | | | | 12977 |
| MHSFNCGGE | EIVMHSFNCGGEFFY | | | | | | | | | | | | | | 12978 |
| YWSQELKNS | LLQYWSQELKNSAVS | | | | | | | | | | | | | | 12979 |
| IGAVELGFL | AVGIGAVFLGFLGAA | | | | | | | | | | | | | | 12980 |
| LIAARTVEL | DFILIAARTVELLGH | | | | | | | | | | | | | | 12981 |
| LICTIIVPW | SGKLICTITVPWNAS | | | | | | | | | | | | | | 12982 |
| LLNGSLAEG | TQLLLNGSLAEGEII | | | | | | | | | | | | | | 12983 |
| YWGQELKNS | LVWYWGQELKNSAIS | | | | | | | | | | | | | | 12984 |
| IAARTVELL | FILIAARTVELLGHS | | | | | | | | | | | | | | 12985 |
| LFLGFLGAA | IGALPLGFLGAAGST | | | | | | | | | | | | | | 12986 |
| LKNSAVSLL | SQELKNSAVSLLNAT | | | | | | | | | | | | | | 12987 |
| VGIGAVELG | KRAVGIGAVILGFLG | | | | | | | | | | | | | | 12988 |
| VSLLNATAI | NSAVSLLNATAIAVA | | | | | | | | | | | | | | 12989 |
| YATGDICGD | QTFYATGDIIGDIRQ | | | | | | | | | | | | | | 12990 |
| IAIAVAEGT | LDIIAIAVAEGTDRI | | | | | | | | | | | | | | 12991 |
| IHYCTPAGF | PIPIHYCTPAGFAIL | | | | | | | | | | | | | | 12992 |
| ILGLVIICS | GTLILGLVIICSASN | | | | | | | | | | | | | | 12993 |
| IWNNMTWME | VDEIWNNMTWMEWER | | | | | | | | | | | | | | 12994 |
| LGLVIICSA | TLILGLVIICSASNN | | | | | | | | | | | | | | 12995 |
| LRDFILTAA | YHRLRDFILIAARTV | | | | | | | | | | | | | | 12996 |
| LTPLCVTLD | CVKLTPLCVTLDCHN | | | | | | | | | | | | | | 12997 |
| MLQLTVWGI | QQHMLQLTVWGIKQL | | | | | | | | | | | | | | 12998 |
| VEINCTRPN | NESVEINCTRPNNNT | | | | | | | | | | | | | | 12999 |
| VRQLLSGIV | TVQVRQLLSGIVQQQ | | | | | | | | | | | | | | 13000 |
| LILGLVIIC | WGTLILGLVIICSAS | | | | | | | | | | | | | | 13001 |
| VGGHQAAMQ | LNTVGGIIQAAMQMLK | | | | | | | | | | | | | | 13002 |
| LLVQNANPD | TETLLVQNANPDCKT | | | | | | | | | | | | | | 13003 |
| VQNANPDCK | TLLVQNANPDCKTIL | | | | | | | | | | | | | | 13004 |
| LGLNKIVRM | WIILGLNKIVRMYSP | 0.0400 | 0.3300 | 0.1100 | 1.1000 | 0.0310 | 0.0290 | 0.3700 | 0.2400 | 1.8000 | 0.0088 | 0.2800 | 0.0024 | | 13005 |
| LSEGATPQD | FSALSEGATPQDLNT | | | | | | | | | | | | | | 13006 |
| WIILGLNKI | YKRWIILGLNKIVRM | 1.2000 | 1.6000 | 0.7800 | 1.1000 | 0.0740 | 0.2400 | 0.3100 | 1.5000 | 4.0000 | 0.1200 | 0.5400 | 0.6200 | | 13007 |
| LEEMMTACQ | GATLEEMMTACQGVG | | | | | | | | | | | | | | 13008 |
| YKRWIILGL | GEIYKRWIILGLNKI | 0.0610 | 0.0660 | 0.0890 | −0.0043 | 0.0300 | 0.1000 | 0.0940 | 0.1800 | 0.0356 | 0.1300 | 0.7800 | 0.1400 | | 13009 |
| IYKRWIILG | VGEIYKRWIILGLNK | | | | | | | | | | | | | | 13010 |
| VSQNYPIVQ | SSQVSQNYPIVQNLQ | | | | | | | | | | | | | | 13011 |
| WEKIRLRPG | LDKWEKIRLRPGGKK | | | | | | | | | | | | | | 13012 |
| IAGTTSTLQ | GSDIAGTTSTLQEQI | | | | | | | | | | | | | | 13013 |
| WASRELERF | HLVWASRELERFALN | | | | | | | | | | | | | | 13014 |
| IPMFSALSE | PEVIPMFSALSEGAT | | | | | | | | | | | | | | 13015 |
| MFSALSEGA | VIFMFSALSEGATPQ | 0.0085 | | −0.0014 | | 0.0058 | | −0.0010 | | | −0.0007 | | | | 13016 |
| VIFMFSALS | SPEVIFMFSALSEGA | 0.0460 | 0.0280 | 0.0034 | −0.0043 | 0.1600 | | 0.0075 | −0.0045 | 0.0007 | −0.0007 | 0.0130 | 0.0130 | | 13017 |
| MYSPVSILD | IVRMYSPVSILDIRQ | | | | | | | | | | | | | | 13018 |
| IVRMYSPVS | LNKIVRMYSPVSILD | | | | | | | | | | | | | | 13019 |
| VRMYSPVSI | NKIVRMYSPVSILDI | | | | | | | | | | | | | | 13020 |
| YSPVSLLDI | VRMYSPVSILDIRQG | | | | | | | | | | | | | | 13021 |
| MTETLLVQN | KNWMTETLLVQNANP | | | | | | | | | | | | | | 13022 |
| WMTETLLVQ | VKNWMTETLLVQNAN | 0.0033 | 0.0130 | 0.0077 | −0.0043 | 0.0480 | | −0.0010 | −0.0045 | 0.0032 | 0.0280 | 0.0008 | 0.0053 | | 13023 |
| ISPRTLNAW | HQAISPRTLNAWVKV | | | | | | | | | | | | | | 13024 |
| VKNWMTETL | TQEVKNWMTETLLVQ | | | | | | | | | | | | | | 13025 |
| IKCFNCGKE | QKRIKCFNCGKEGHL | | | | | | | | | | | | | | 13026 |
| IPVGEIYKR | NPPIPVGEIYKRWII | | | | | | | | | | | | | | 13027 |
| YTAVFMQRG | KGGYTAVFMQRGQNP | | | | | | | | | | | | | | 13028 |
| VATLYCVHQ | YNTVATLYCVHQRIE | | | | | | | | | | | | | | 13029 |
| WDRLHPVHA | AAEWDRLHPVHAGPI | | | | | | | | | | | | | | 13030 |
| FLQSRPEPT | PGNFLQSRPEPTAPP | 0.0970 | | 0.0170 | | 0.0190 | | 0.0015 | | | 0.0130 | | | | 13031 |
| FKTLRAEQA | DRFIKTLRAEQATQE | | | | | | | | | | | | | | 13032 |
| MVHQAISPR | QGQMVHQAISPRTLN | 0.0690 | 0.1400 | 1.5000 | 0.0170 | 0.8300 | 0.0950 | −0.0010 | 0.0048 | 0.0085 | 0.550 | 0.0067 | 0.6400 | | 13033 |
| VHQAISPRT | GQMVHQAISPRTLNA | 0.0003 | | 0.0023 | | 0.0034 | | −0.0010 | | | −0.0007 | | | | 13034 |
| YKTLRAEQA | DRFYKTLRAEQASQE | 0.0530 | 0.0016 | 0.0500 | | 0.1500 | | 0.0430 | | −0.0001 | 0.0028 | | −0.0015 | | 13035 |
| VSILDIRQG | YSPVSILDIRQGPKE | | | | | | | | | | | | | | 13036 |
| LAEAMSQVT | ARVLAEAMSQVTNSA | | | | | | | | | | | | | | 13037 |
| LGKIWPSHK | ANFLGKTWPSHKGRP | | | | | | | | | | | | | | 13038 |
| VKCFNCGKE | RKTVKCFNCGKEGHI | | | | | | | | | | | | | | 13039 |
| YNTVATLYC | RSLYNTVAILYCVHQ | | | | | | | | | | | | | | 13040 |
| LHPVHAGPI | WDRLHPVHAGPIAPG | | | | | | | | | | | | | | 13041 |
| LYNTVATLY | LRSLYNTVATLYCVH | | | | | | | | | | | | | | 13042 |
| MTDTLLVQN | KNWMTDTLLVQNANP | | | | | | | | | | | | | | 13043 |
| WMTDTLLVQ | VKNWMTDTLLVQNAN | | | | | | | | | | | | | | 13044 |
| IEVKDTKEA | HQRIEVKDTKEALDK | | | | | | | | | | | | | | 13045 |
| LQGQMVHQA | VQNLQGQMVHQAISP | | | | | | | | | | | | | | 13046 |
| MTNNPPIPV | IGWMTNNPPIPVGEI | | | | | | | | | | | | | | 13047 |
| WMTNNPPIP | QIGWMTNNPPIPVGE | | | | | | | | | | | | | | 13048 |
| IAPGQMREP | AGPIAPGQMREPRGS | | | | | | | | | | | | | | 13049 |
| VHAGPIAPG | LHPVHAGPIAPGQMR | | | | | | | | | | | | | | 13050 |
| LGPGATLEE | LRALGPGATLEEMMT | | | | | | | | | | | | | | 13051 |
| VHAGPIPPG | VHPVHAGPIPPGQMR | | | | | | | | | | | | | | 13052 |
| IPPGQMREP | AGPIPPGQMREPRGS | | | | | | | | | | | | | | 13053 |
| LSPRTLNAW | HQALSPRTLNAWVKV | | | | | | | | | | | | | | 13054 |
| YRLKHLVWA | KKKYRLKIILVWASRE | | | | | | | | | | | | | | 13055 |
| LGPAATLEE | LKALGPAATLEEMMT | | | | | | | | | | | | | | 13056 |
| LKALGPAAT | KTILKALGPAATLEE | 0.0760 | | 0.0100 | | −0.0023 | | −0.0010 | | | 0.0006 | | | | 13057 |
| LKDKEPPLA | QEQLKDKEPPLASLR | | | | | | | | | | | | | | 13058 |
| LSGGKLDAW | ASVLSGGKLDAWEKI | | | | | | | | | | | | | | 13059 |
| MTSNPPIPV | IGWMTSNPPIPVGEI | | | | | | | | | | | | | | 13060 |
| VKNWMTDTL | TQDVKNWMTDTLLVQ | | | | | | | | | | | | | | 13061 |
| VSILDIKQG | YSPVSILDIKQGPKE | | | | | | | | | | | | | | 13062 |
| WMTSNPPIP | QIGWMTSNPPIPVGE | | | | | | | | | | | | | | 13063 |
| FNTVATLYC | KSLENTVATLYCVHQ | | | | | | | | | | | | | | 13064 |
| IPMFTALSE | PEVIPMPTALSEGAT | | | | | | | | | | | | | | 13065 |
| LASLKSLFG | LYPLASLKSLFGNDP | | | | | | | | | | | | | | 13066 |
| LERFAVNPG | SRELERFAVNPGLLE | | | | | | | | | | | | | | 13067 |
| LFNTVATLY | LRSLFNTVATLYCVH | | | | | | | | | | | | | | 13068 |
| MFTALSEGA | VIPMFTALSEGATPQ | | | | | | | | | | | | | | 13069 |
| WDRVHPVHA | AAEWDRVHPVHAGPI | | | | | | | | | | | | | | 13070 |
| IVRMYSPTS | LNKIVRMYSPTSILD | | | | | | | | | | | | | | 13071 |
| LERFALNPG | SRELERFALNPGLLE | | | | | | | | | | | | | | 13072 |
| LQEQIAWMT | TSTLQEQIAWMTGNP | | | | | | | | | | | | | | 13073 |
| VHPVHAGPI | WDRVHPVHAGPIPPG | | | | | | | | | | | | | | 13074 |
| VIFMFTALS | SPEVIPMFTALSEGA | | | | | | | | | | | | | | 13075 |
| VRMYSPTSI | NKIVRMYSPTSILDI | | | | | | | | | | | | | | 13076 |
| LGKTWPSNK | ANFLGKIWPSNKGRP | | | | | | | | | | | | | | 13077 |
| LTSLKSLFG | LYPLTSLKSLFGNDP | | | | | | | | | | | | | | 13078 |
| MYSPTSILD | IVRMYSPTSILDIRQ | | | | | | | | | | | | | | 13079 |
| YKLKHTVWA | KKKYKLKHIVWASRE | | | | | | | | | | | | | | 13080 |
| YSPTSILDI | VRMYSPTSILDIRQG | | | | | | | | | | | | | | 13081 |
| LTSLRSLFG | LYPLTSLRSLFGNDP | | | | | | | | | | | | | | 13082 |
| MMLNIVGGH | DLNMMLNIVGGNQAA | | | | | | | | | | | | | | 13083 |
| IDVKDTKEA | HQRIDVKDTKEALDK | | | | | | | | | | | | | | 13084 |
| IGWMTSNPP | QEQIGWMTSHPPIPV | | | | | | | | | | | | | | 13085 |
| IPVGDIYKR | NPPIPVGDIYKRWII | | | | | | | | | | | | | | 13086 |
| LYPLASLKS | DKELYPLASLKSLFG | | | | | | | | | | | | | | 13087 |
| VRQALSPRT | GQMVHQALSPRTLNA | | | | | | | | | | | | | | 13088 |
| VNPGLLETS | RFAVNPGLLETSEGC | | | | | | | | | | | | | | 13089 |
| YPLASLKSL | KELYPLASLKSLFGN | | | | | | | | | | | | | | 13090 |
| FLQNRPEPT | PGNFLQNRPEPTAPP | | | | | | | | | | | | | | 13091 |
| IMMQKSNFK | AAAIMMQKSNFKGPR | | | | | | | | | | | | | | 13092 |
| LAEAMSQVQ | ARVLAEAMSQVQQSN | | | | | | | | | | | | | | 13093 |
| LGKIWPSSK | ANFLGKIWPSSKGRP | | | | | | | | | | | | | | 13094 |
| LNPGLLETA | RFALNPGLLETAEGC | | | | | | | | | | | | | | 13095 |
| YPLASLRSL | KELYPLASLRSLFGN | | | | | | | | | | | | | | 13096 |
| WQNYTPGPG | FPDWQNYTPGPGIRY | | | | | | | | | | | | | | 13097 |
| VRPQVPLRP | GFPVRPQVPLRPMTY | | | | | | | | | | | | | | 13098 |
| VPLRPMTYK | RPQVPLRPMTYKGAF | | | | | | | | | | | | | | 13099 |
| LTFGWCFKL | RYPLTFGWCFKLVPV | | | | | | | | | | | | | | 13100 |
| ILDLWVYHT | RQEILDLWVYHTQGY | | | | | | | | | | | | | | 13101 |
| WCFKLVPVD | TFGWCPKLVPVDPRE | | | | | | | | | | | | | | 13102 |
| LWVYHTQGY | ILDLWVYHTQGYFPD | | | | | | | | | | | | | | 13103 |
| WSKSSIVGW | GGKWSKSSIVGWPAI | | | | | | | | | | | | | | 13104 |
| ILDLWVYNT | RQDILDLWVYNTQGY | | | | | | | | | | | | | | 13105 |
| LLHPMSQHG | NNCLLHPMSQHGMDD | | | | | | | | | | | | | | 13106 |
| LLHPICQHG | NNSLLHPICQHGMED | | | | | | | | | | | | | | 13107 |
| IRYPLTFGW | GPGIRYPLTFGWCFK | | | | | | | | | | | | | | 13108 |
| ITSSNTAAT | HGAITSSNTAATNAD | | | | | | | | | | | | | | 13109 |
| LEKHGAITS | SRDLEKHGAITSSNT | | | | | | | | | | | | | | 13110 |
| LWVYHTQGF | ILDLWVYHTQGFFPD | | | | | | | | | | | | | | 13111 |
| MTYKGAFDL | LRPMTYKGAFDLSFF | | | | | | | | | | | | | | 13112 |
| LVPVDPREV | CFKLVPVDPREVEEA | | | | | | | | | | | | | | 13113 |
| VGWPAIRER | SSIVGWPAIRERMRR | | | | | | | | | | | | | | 13114 |
| WCFKLVPVE | TFGWCFKLVPVEPEK | | | | | | | | | | | | | | 13115 |
| FDSRLAFHH | EWRFDSRLAFHHVAR | | | | | | | | | | | | | | 13116 |
| FKLVPVDPR | GWCFKLVPVDPRBVE | | | | | | | | | | | | | | 13117 |
| VPLRPMTFK | RPQVPLRPMTFKGAF | | | | | | | | | | | | | | 13118 |
| LLDTGADDT | KEALLDTGADDTVLE | 0.0001 | | −0.0015 | | −0.0023 | | −0.0010 | | | −0.0003 | | | | 13119 |
| WMGYELHPD | PFLWMGYELHPDKWT | | | | | | | | | | | | | | 13120 |
| YQYNVLPQG | GIRYQYNVLPQGWKG | | | | | | | | | | | | | | 13121 |
| FRKYTAFTI | DKDFRKYTAFTIPSI | | | | | | | | | | | | | | 13122 |
| WTVNDIQKL | KDSWTVNDIQKLVGK | 0.0027 | | −0.0014 | | −0.0026 | | 0.1200 | | | −0.0005 | | | | 13123 |
| LDCTHLEGK | IWQLDCTIILEGKIIL | | | | | | | | | | | | | | 13124 |
| LDVGDAYFS | VTVLDVGDAYFSVPL | 0.0003 | | −0.0014 | | −0.0026 | | −0.0007 | | | −0.0005 | | | | 13125 |
| MDDLYVGSD | YQYMDDLYVGSDLEI | 0.0006 | | −0.0014 | −0.0160 | 0.0036 | | −0.0006 | | | −0.0005 | | | | 13126 |
| VIPAETGQE | EAEVIPAETGQETAY | | | | | | | | | | | | | | 13127 |
| WKGEGAVVI | KLLWKGEGAVVIQDN | 0.4600 | 0.0011 | 0.0058 | −0.0043 | 0.0750 | 0.0200 | 0.0060 | −0.0045 | 0.0450 | 0.2400 | 0.0450 | 0.2100 | | 13128 |
| WQLDCTHLE | PGIWQLDCTHLEGKI | | | | | | | | | | | | | | 13129 |
| VDFRELNKR | RKLVDFRELNKRTQD | | | | | | | | | | | | | | 13130 |
| WKPKMIGGI | PGKWKPKMIGGIGGF | | | | | | | | | | | | | | 13131 |
| IWQLDCTHL | SPGIWQLDCTHLEGK | 0.0013 | | −0.0021 | | 0.0990 | | −0.0006 | | | −0.0009 | | | | 13132 |
| VAVHVASGY | IILVAVIIVASGYIEA | | | | | | | | | | | | | | 13133 |
| WKGSPAIFQ | PQGWKGSPAIFQSSM | 0.0010 | | −0.0014 | | −0.0026 | | −0.0007 | | | 0.0087 | | | | 13134 |
| IGGYSAGER | KGGIGGYSAGERIID | | | | | | | | | | | | | | 13135 |
| YALGIIQAQ | DSQYALGIIQAQPDK | | | | | | | | | | | | | | 13136 |
| FWEVQLGIP | TQDFWEVQLGIPHPA | | | | | | | | | | | | | | 13137 |
| IKKKDSTKW | VFAIKKKDSTKWRKL | | | | | | | | | | | | | | 13138 |
| LGIIQAQPD | QYALGIIQAQPDKSE | | | | | | | | | | | | | | 13139 |
| LGIPHPAGL | EVQLGIPHPAGLKKK | 0.0020 | | 0.1300 | | −0.0026 | | −0.0007 | | | −0.0005 | | | | 13140 |
| VNTPPLVKL | WEFVNTPPLVKLWYQ | 0.6900 | 0.0410 | 9.5000 | 0.0220 | 1.8000 | 1.9000 | 0.0630 | 0.2200 | 0.0390 | 1.7000 | 0.1400 | 1.9000 | | 13141 |
| VTVLDVGDA | KKSVTVLDVGDAYFS | 0.0019 | | −0.0014 | | 0.0065 | | 0.0030 | | | −0.0005 | | | | 13142 |
| FPISPIETV | TLNFPISPIETVPVK | 0.0190 | 0.0003 | −0.0014 | −0.0043 | 0.0350 | | −0.0007 | 0.0370 | 0.0150 | 0.0640 | −0.0005 | 0.0016 | | 13143 |
| ISPIETVPV | NFPISPIETVPVKLK | 0.0480 | 0.0013 | 0.0022 | −0.0043 | 0.0810 | 0.0095 | −0.0007 | 0.0460 | 0.0190 | 0.1500 | 0.0008 | 0.0046 | | 13144 |
| FVNTPPLVK | EWEFVNTPPLVKLWY | | | | | | | | | | | | | | 13145 |
| LNFPISPIE | GCTLNFPISPIETVP | 0.0014 | | −0.0014 | | −0.0026 | | −0.0006 | | | 0.0380 | | | | 13146 |
| WEFVNTPPL | IPEWEFVNTPPLVKL | 1.1000 | 0.0089 | 1.8000 | 0.0920 | 0.6600 | 1.6000 | 0.0830 | 0.0540 | 0.0230 | 1.4000 | 0.2600 | 2.6000 | | 13147 |
| IQNFRVYYR | ITKIQNFRVYYRDSR | | | | | | | | | | | | | | 13148 |
| LVGPTPVNI | GTVLVGPTPVNIIGR | 0.0066 | 0.0061 | −0.0014 | −0.0043 | −0.0026 | | 0.0043 | −0.0045 | 0.0290 | 0.0820 | −0.0005 | 0.0180 | | 13149 |
| VQLGIPHPA | FWEVQLGIPHPAGLK | 0.0240 | | −0.0014 | | 0.0033 | | −0.0006 | | | 0.0024 | | | | 13150 |
| WQATWIPEW | TEYWQATWIPEWEFV | | | | | | | | | | | | | | 13151 |
| IETVPVKLK | ISPIETVPVKLKPGM | 0.0019 | | 0.0140 | | −0.0026 | | −0.0007 | | | 0.0150 | | | | 13152 |
| IGTVLVGPT | KKAIGTVLVGPTPVN | | | | | | | | | | | | | | 13153 |
| LVAVHVASG | KIILVAVHVASGYIE | | | | | | | | | | | | | | 13154 |
| VLVGPTPVN | IGTVLVGPTPVNIIG | 0.0120 | 0.0170 | −0.0003 | | 0.0008 | 0.0030 | −0.0004 | | 0.0400 | 0.0710 | −0.0003 | 0.0320 | | 13155 |
| YIEAEVIPA | ASGYIEAEVIPAFTG | 0.0230 | −0.0003 | −0.0021 | −0.0043 | 0.2300 | | 0.0020 | −0.0045 | 0.0400 | 0.0710 | −0.0003 | 0.0320 | 13156 | |
| YVGSDLEIG | DDLYVGSDLEKSQHR | | | | | | | | | | | | | | 13157 |
| MDGPKVKQW | KPGMDGPKVKQWPLT | | | | | | | | | | | | | | 13158 |
| VASGYIEAE | AVIIVASGYIEAEVIP | | | | | | | | | | | | | | 13159 |
| VGPTPVNII | TVLVGPTPVNIIGRN | 0.0010 | | −0.0014 | | −0.0026 | | 0.0035 | | | 0.0150 | | | | 13160 |
| VKQWPLTEE | GPKVKQWPLTEEKIK | | | | | | | | | | | | | | 13161 |
| VYYRDSRDP | NFRVYYRDSRDPIWK | | | | | | | | | | | | | | 13162 |
| WGFTTPDKK | LLRWGFTTPDKKHQK | | | | | | | | | | | | | | 13163 |
| VIYQYMDDL | PEIVIYQYMDDLYVG | | | | | | | | | | | | | | 13164 |
| LKKKKSVTV | PAGLKKKKSVTVLDV | 0.0060 | | −0.0014 | | −0.0026 | | −0.0006 | | | 0.0140 | | | | 13165 |
| VPRRKAKII | IKVVPRRKAKIIRDY | 0.0003 | | 0.0700 | | −0.0024 | | 2.5000 | | | 0.0030 | | | | 13166 |
| FPQITLWQR | SFSFPQITLWQRPLV | 0.0027 | | | | 0.0130 | | | | | 0.0006 | | | | 13167 |
| VIWGKTPKF | ESIVIWGKTPKFRLP | | | | | | | | | | | | | | 13168 |
| YVDGAANRE | ETFYVDGAANRETKL | | | | | | | | | | | | | | 13169 |
| FKNLKTGKY | QEPPKNLKTGKYAKM | | | | | | | | | | | | | | 13170 |
| IQTKELQKQ | ATDIQTKELQKQITK | | | | | | | | | | | | | | 13171 |
| YGKQMAGDD | IRDYGKQMAGDDCVA | | | | | | | | | | | | | | 13172 |
| WRAMASDFN | HSNWRAMASDFNLPP | 0.1500 | 0.0004 | 0.1600 | −0.0030 | 4.7000 | 2.6000 | 0.2100 | −0.0045 | 0.0008 | 0.0530 | 0.0250 | 0.0860 | | 13173 |
| ISKJGPENP | EGKISKIGPENPYNT | | | | | | | | | | | | | | 13174 |
| LTQIGCTLN | RNLLTQIGCTLNFPI | | | | | | | | | | | | | | 13175 |
| IIQAQPDKS | ALGIIQAQPDKSESE | 0.0001 | | −0.0014 | | −0.0026 | | −0.0007 | | | −0.0005 | | | | 13176 |
| LPEKDSWTV | PIVLPEKDSWTVNDI | | | | | | | | | | | | | | 13177 |
| FQSSMTKIL | PAIFQSSMTKILEPF | 0.0320 | 0.0320 | 0.0200 | −0.0043 | 0.0058 | 0.6500 | 0.0660 | −0.0045 | 0.1100 | 0.7300 | 0.0140 | 0.9100 | | 13178 |
| FTIPSINNE | YTAFTIPSTNNSTPG | | | | | | | | | | | | | | 13179 |
| IFQSSMTKI | SPAIFQSSMTKILEP | 0.0140 | 0.0420 | 0.0300 | −0.0043 | 0.0140 | 0.3500 | 0.0270 | 0.0122 | 0.2800 | 0.3700 | 0.0150 | 2.3000 | 13180 | |
| IIEQLIKKE | VSQIIEQLIKKEKVY | | | | | | | | | | | | | | 13181 |
| LSWVPAHKG | KVYLSWVPAHKGIGG | | | | | | | | | | | | | | 13182 |
| YLSWVPAHK | EKVYLSWVPAHKGIG | | | | | | | | | | | | | | 13183 |
| YTAFTIPSI | FRKYTAFTIPSINNE | 0.0270 | 0.1300 | 0.0048 | −0.0043 | 0.1700 | 0.2800 | 0.0110 | 0.0089 | −0.0004 | 0.8400 | 0.0610 | 1.900 | | 13184 |
| IIATDIQTK | ITDIIATDIQTKELQ | | | | | | | | | | | | | | 13185 |
| IWKGPAKLL | RDPIWKGPAKLLWKG | | | | | | | | | | | | | | 13186 |
| LQKQITKIQ | TKELQKQITKIQNFR | 0.0071 | 0.0210 | 0.0350 | | 0.0540 | 0.0200 | 0.0530 | | 0.0050 | 0.0055 | 0.0250 | 0.0028 | | 13187 |
| LKEALLDTG | GGQLKEALLDTGADD | 0.0001 | | −0.0021 | | −0.0024 | | −0.0005 | | | −0.0009 | | | | 13188 |
| VYLSWVPAH | KEKVYLSWVPAHKGI | | | | | | | | | | | | | | 13189 |
| FILKLAGRW | TAYFILKLAGRWPVK | | | | | | | | | | | | | | 13190 |
| LEGKIILVA | CTHLEGKIILVAVHV | | | | | | | | | | | | | | 13191 |
| YFILKLAGR | ETAYFILKLAGRWPV | | | | | | | | | | | | | | 13192 |
| IILVAVHVA | EGKIILVAVHVASGY | | | | | | | | | | | | | | 13193 |
| IWGKTPKFR | SIVIWGKTPKFRLPI | | | | | | | | | | | | | | 13194 |
| LAGRWPVKV | ILKLAGRWPVKVIHT | | | | | | | | | | | | | | 13195 |
| VVAKEIVAS | LPPVVAKEIVASCDK | 0.0001 | | −0.0021 | | 0.0043 | | −0.0010 | | | −0.0009 | | | | 13196 |
| IDIIATDIQ | ERIIDIIATDIQTKE | | | | | | | | | | | | | | 13197 |
| IIDIIATDI | GERIIDIIATDIQTK | | | | | | | | | | | | | | 13198 |
| IIGRNMLTQ | PVNIIGRNMLTQIGC | | | | | | | | | | | | | | 13199 |
| IKVKQLCKL | YAGIKVKQLCKLLRG | | | | | | | | | | | | | | 13200 |
| VDKLVSSGI | NEQVDKLVSSGIRKV | | | | | | | | | | | | | | 13201 |
| IVGAETFYV | KEPIVGAETFYVDGA | | | | | | | | | | | | | | 13202 |
| LPPVVAKEI | DFNLPPVVAKEIVAS | 0.0042 | | −0.0021 | | −0.0024 | | 0.0036 | | | 0.0530 | | | | 13203 |
| WTVQPIQLP | PDKWTVQPIQLPEKD | | | | | | | | | | | | | | 13204 |
| FNLPPVVAK | ASDFNLPPVVAKEIY | 0.0026 | | −0.0021 | | −0.0028 | | −0.0006 | | | 0.0840 | | | | 13205 |
| FTSAAVKAA | GSNFTSAAVKAACWW | | | | | | | | | | | | | | 13206 |
| LALQDSGLE | AIHLALQDSGLEVNI | | | | | | | | | | | | | | 13207 |
| LPPIVAKEI | DFNLPPIVAKEIVAS | | | | | | | | | | | | | | 13208 |
| LQDSGLEVN | HLALQDSGLEVNIVT | | | | | | | | | | | | | | 13209 |
| FNLPPIVAK | ASDFNLPPIVAKEV | | | | | | | | | | | | | | 13210 |
| IGQHRAKIE | DLEIGQHRAKIEELR | | | | | | | | | | | | | | 13211 |
| IIGRNLLTQ | PVNIIGRNLLTQIGC | 0.0059 | | −0.0014 | | 0.0043 | | 0.0990 | | | −0.0005 | | | | 13212 |
| LEVNIVTDS | DSGLEVNIVTDSQYA | 0.0001 | | −0.0014 | | 0.0350 | | −0.0007 | | | −0.0005 | | | | 13213 |
| LRGAKALTD | CKLLRGAKALTDIVP | | | | | | | | | | | | | | 13214 |
| LVSSGIRKV | VDKLVSSGIRKVLFL | | | | | | | | | | | | | | 13215 |
| FLLKLAGRW | TAYFLLKLAGRWPVK | | | | | | | | | | | | | | 13216 |
| LALQDSGSE | AIHLALQDSGSEVNI | | | | | | | | | | | | | | 13217 |
| LQDSGSEVN | HLALQDSGSEVNIVT | | | | | | | | | | | | | | 13218 |
| VKVIHTDNG | RWPVKVIHTDNGSNF | | | | | | | | | | | | | | 13219 |
| WPVKVIHTD | AGRWPVKVIHTDNGS | | | | | | | | | | | | | | 13220 |
| YFLLKLAGR | ETAYFLLKLAGRWPV | 0.0610 | | | | 0.0210 | | | | | 0.0041 | | | | 13221 |
| ICGKKAIGT | LIEICGKKAIGTVLV | | | | | | | | | | | | | | 13222 |
| IVAKEIVAS | LPPIVAKEIVASCDK | | | | | | | | | | | | | | 13223 |
| LRWGFTTPD | QHLLRWGFTTPDKKH | | | | | | | | | | | | | | 13224 |
| LEGKVILVA | CTHLEGKVILVAVIIV | | | | | | | | | | | | | | 13225 |
| LKWGFTTPD | EHLLKWGFTIPDKKH | | | | | | | | | | | | | | 13226 |
| VILVAVHVA | EGKVILVAVHVASGY | | | | | | | | | | | | | | 13227 |
| LAWVPAHKG | KVYLAWVPAHKGIGG | 0.6000 | 0.3700 | 0.8200 | 0.0049 | 0.3200 | 0.2300 | 0.2800 | 0.0240 | 0.0014 | 0.1400 | 0.2500 | 0.3000 | | 13228 |
| YDQILIEC | VRQYDQILIEICGKK | | | | | | | | | | | | | | 13229 |
| YLAWVPAHK | EKVYLAWVPAHKGIG | 1.4000 | 0.4400 | 4.1000 | 0.0930 | 5.4000 | 1.4000 | 0.5400 | 0.0460 | 0.0010 | 1.4000 | 1.6000 | 0.5200 | | 13230 |
| IGQHRTKIE | DLEIGQHRTKIEELR | | | | | | | | | | | | | | 13231 |
| IGRNLLTQI | VNIIGRNLLTQIGCT | 0.0027 | | −0.0014 | | 0.0620 | | 0.0067 | | | 0.0012 | | | | 13232 |
| LWQRPLVTI | QITLWQRPLVTIKIG | | | | | | | | | | | | | | 13233 |
| VSLTETTNQ | QKVVSLTETTNQKTE | | | | | | | | | | | | | | 13234 |
| VYLAWVPAH | KEKVYLAWVPAHKGI | | | | | | | | | | | | | | 13235 |
| ICGHKAIGT | LIEICGHKAIGTVLV | | | | | | | | | | | | | | 13236 |
| LRGTKALTE | CKLLRGTKALTEVIP | | | | | | | | | | | | | | 13237 |
| LVNQIIEQL | ESELVNQIIEQLIKK | | | | | | | | | | | | | | 13238 |
| LVSQIIEQL | ESELVSQIIEQLIKK | 0.0059 | | 0.0210 | | 0.0095 | | 0.0009 | | | 0.0040 | | | | 13239 |
| YFSVPLDKD | GDAYFSVPLDKDFRK | | | | | | | | | | | | | | 13240 |
| IGRNMLTQI | VNIIGRNMLTQIGCT | | | | | | | | | | | | | | 13241 |
| IKVRQLCKL | YPGIKVRQLCKLLRG | | | | | | | | | | | | | | 13242 |
| LWKGPAKLL | RDPLWKGPAKLLWKG | | | | | | | | | | | | | | 13243 |
| LWQRPLVTV | QITLWQRPLVTVKIG | | | | | | | | | | | | | | 13244 |
| YAGIKVKQL | SQIYAGIKVKQLCKL | | | | | | | | | | | | | | 13245 |
| IWGKTPKFK | SIVIWGKTPKFKLPI | | | | | | | | | | | | | | 13246 |
| LREHLLKWG | IEELREIILLKWGFTT | | | | | | | | | | | | | | 13247 |
| VQPIQLPEK | KWTVQPIQLPEKDSW | | | | | | | | | | | | | | 13248 |
| WQRPLVTIK | ITLWQRPLVTIKIGG | | | | | | | | | | | | | | 13249 |
| IIQAQPDRS | ALGIIQAQPDRSESE | | | | | | | | | | | | | | 13250 |
| LQAIHLALQ | KTELQAIHLALQDSG | | | | | | | | | | | | | | 13251 |
| LVEICTEME | IKALVEICTEMEKEG | | | | | | | | | | | | | | 13252 |
| LRQHLLRWG | IEELRQHLLRWGFTT | | | | | | | | | | | | | | 13253 |
| LTQLGCTLN | RNMLTQLGCTLNFPI | | | | | | | | | | | | | | 13254 |
| LVSAGIRKV | VDKLVSAGIRKVLFL | 0.0039 | | 0.1500 | | −0.0026 | | 0.0045 | | | 0.0120 | | | | 13255 |
| VDKLVSAGI | NEQVDKLVSAGIRKV | 0.0024 | | 0.5900 | | −0.0026 | | −0.0006 | | | 0.0028 | | | | 13256 |
| YPGIKVRQL | SQIYPGIKVRQLCKL | | | | | | | | | | | | | | 13257 |
| FRKQNPDIV | LEPFRKQNPDIVIYQ | | | | | | | | | | | | | | 13258 |
| FSFPQITLW | TVSFSFPQITLWQRP | | | | | | | | | | | | | | 13259 |
| FTSTTVKAA | GSNFTSTTVKAACWW | | | | | | | | | | | | | | 13260 |
| IIASDIQTK | IIDITASDIQTKELQ | | | | | | | | | | | | | | 13261 |
| LAGRWPVKT | LLKLAGRWPVKTIHT | | | | | | | | | | | | | | 13262 |
| VQKIATESI | TEAVQKIATESIVIW | | | | | | | | | | | | | | 13263 |
| FTIPSTNNE | YTAFTIPSTNNETPG | | | | | | | | | | | | | | 13264 |
| LEDINLPGK | DTVLEDINLPGKWKP | | | | | | | | | | | | | | 13265 |
| LTDIVPLTE | AKALTDIVPLTEEAE | | | | | | | | | | | | | | 13266 |
| LVTIKIGGQ | QRPLVTIKIGGQLKE | | | | | | | | | | | | | | 13261 |
| MRGAHTNDV | YARMRGAHTNDVKQL | | | | | | | | | | | | | | 13268 |
| VKTIHTDNG | RWPVKTIHTDNGSNF | | | | | | | | | | | | | | 13269 |
| VQPIVLPEK | KWTVQPIVLPEKDSW | | | | | | | | | | | | | | 13270 |
| WPVKTIHTD | AGRWPVKTIHTDNGS | | | | | | | | | | | | | | 13271 |
| WQRPLVTVK | ITLWQRPLVTVKIGG | | | | | | | | | | | | | | 13272 |
| WTVQPIVLP | PDKWTVQPIVLPEKD | | | | | | | | | | | | | | 13273 |
| YTAFTIPST | FRKYTAPTIPSTNNE | | | | | | | | | | | | | | 13274 |
| IDIIASDIQ | ERIIDIIASDIQTKE | | | | | | | | | | | | | | 13275 |
| IIDIIASDI | GERIIDTIASDIQTK | | | | | | | | | | | | | | 13276 |
| IVDIIATDI | GERIVDIIATDIQTK | 0.0031 | | | | 0.0320 | | | | | 0.0026 | | | | 13277 |
| LEEINLPGK | DTVLEEINLPGKWKP | | | | | | | | | | | | | | 13278 |
| LQAIYLALQ | KTELQAIYLALQDSG | | | | | | | | | | | | | | 13279 |
| LQKQTIKIQ | TKELQKQIIKIQNFR | | | | | | | | | | | | | | 13280 |
| VDIIATDIQ | ERIVDIIATDIQTKE | | | | | | | | | | | | | | 13281 |
| YDQIPIEIC | VRQYDQIPIEICGKK | | | | | | | | | | | | | | 13282 |
| FNFPQITLW | VPTFNFPQITLWQRP | | | | | | | | | | | | | | 13283 |
| IGRNMLTQL | VNIIGRNMLTQLGCT | | | | | | | | | | | | | | 13284 |
| ISRIGPENP | EGKISRIGPENPYNT | | | | | | | | | | | | | | 13285 |
| LTEVIPLTE | TKALTEVIPLTEEAE | | | | | | | | | | | | | | 13286 |
| MESIVIWGK | KIAMESIVIWGKTPK | | | | | | | | | | | | | | 13287 |
| VPRRKVKII | IKVVPRRKVKIIRPY | | | | | | | | | | | | | | 13288 |
| VSFSPPQIT | QGTVSFSFPQITLWQ | | | | | | | | | | | | | | 13289 |
| WYQLETEPI | VKLWYQLETEPIVGA | | | | | | | | | | | | | | 13290 |
| YPGIKVKQL | SQIVPGIKVKQLCKL | | | | | | | | | | | | | | 13291 |
| FPQGEAREF | NLAFPQGEAREFPPE | | | | | | | | | | | | | | 13292 |
| LIEALLDTG | GGQLIEALLDTGADD | | | | | | | | | | | | | | 13293 |
| VSLTDTTNQ | QKVVSLTDTTNQKTE | | | | | | | | | | | | | | 13294 |
| WETWWTDYW | KETWETWWTDYWQAT | | | | | | | | | | | | | | 13295 |
| YAKMRTAHT | TGKYAKMRTAHTNDV | | | | | | | | | | | | | | 13296 |
| YKNLKTGKY | QEPYKNLKTGKYARM | | | | | | | | | | | | | | 13297 |
| LQLPPLERL | PVPLQLPPLERLTLD | | | | | | | | | | | | | | 13298 |
| VPLQLPPLE | AEPVPLQLPPLERLT | | | | | | | | | | | | | | 13299 |
| LYQSNPPPS | IKFLYQSNPPPSPEG | | | | | | | | | | | | | | 13300 |
| VRIIKILYQ | LKAVRIIKILYQSNP | | | | | | | | | | | | | | 13301 |
| YQSNPPPSP | KFLYQSNPPPSPEGT | | | | | | | | | | | | | | 13302 |
| LQLPPIERL | PVPLQLPPIERLRLD | | | | | | | | | | | | | | 13303 |
| VPLQLPPIE | AEPVPLQLPPIERLR | | | | | | | | | | | | | | 13304 |
| WNHPGSQPK | LEPWNHPGSQPKTAC | | | | | | | | | | | | | | 13305 |
| FLNKGLGIS | QVCFLNKGLGISYGR | | | | | | | | | | | | | | 13306 |
| WKHPGSQPK | LEPWKHPGSQPKTAC | | | | | | | | | | | | | | 13307 |
| YCKKCCFHC | NNCYCKKCCFHCQVC | | | | | | | | | | | | | | 13308 |
| YCKKCCYHC | TNCYCKKCCYHCQVC | | | | | | | | | | | | | | 13309 |
| WNHPGSQPT | LEPWNIIPGSQPTTAC | | | | | | | | | | | | | | 13310 |
| MIVWQVDRM | WQVMIVWQVDRMRIR | | | | | | | | | | | | | | 13311 |
| WQVMIVWQV | ENRWQVMIVWQVDRM | 3.3000 | 0.0059 | 0.0036 | −0.0043 | 0.0690 | 1.9000 | 0.0032 | −0.0045 | 0.0018 | 0.1200 | 0.1500 | 0.2900 | | 13312 |
| WQVDLMPIR | MIVWQVDRMRIRTWK | | | | | | | | | | | | | | 13313 |
| LQYLALTAL | VGSLQYLALTALIKP | | | | | | | | | | | | | | 13314 |
| LGHGVSIEW | DWHLGHGVSIEWRLR | | | | | | | | | | | | | | 13315 |
| VDRMRIRTW | VWQVDRMRIRTWNSL | | | | | | | | | | | | | | 13316 |
| YFDCFSESA | HLYYFDCFSESAIRN | | | | | | | | | | | | | | 13317 |
| YWGLHTGER | ITTYWGLHTGERDWH | | | | | | | | | | | | | | 13318 |
| IRTWNSLVK | RMRIRTWNSLVKHHM | | | | | | | | | | | | | | 13319 |
| LGQGVSIEW | DWHLGQGVSIEWRKK | | | | | | | | | | | | | | 13320 |
| LVKHHMYVS | WNSLVKHHMYVSKKA | | | | | | | | | | | | | | 13321 |
| IPLGEARLV | EVHIPLGEARLVVRT | | | | | | | | | | | | | | 13322 |
| LVKHHMYIS | WKSLVKHHMYISGKA | | | | | | | | | | | | | | 13323 |
| YLALTALIK | SLQYLALTALIKPKK | | | | | | | | | | | | | | 13324 |
| TRTWKSLVK | RMRIRTWKSLVKHIIM | | | | | | | | | | | | | | 13325 |
| LADQLIHLY | DPDLADQLIHLYYFD | | | | | | | | | | | | | | 13326 |
| LALTALIKP | LQYLALTALIKPKKI | | | | | | | | | | | | | | 13327 |
| VDPGLADQL | STQVDPGLADQLIHL | | | | | | | | | | | | | | 13328 |
| LYYFDCFSE | LIHLYYFDCFSESAI | | | | | | | | | | | | | | 13329 |
| FSESAIRKA | FDCFSESAIRKAILG | | | | | | | | | | | | | | 13330 |
| LADQLIHMH | EPGLADQLIHMHYPD | | | | | | | | | | | | | | 13331 |
| WQVDRMKIR | LIVWQVDRMKIRTWN | | | | | | | | | | | | | | 13332 |
| FSDSAIRKA | FDCFSDSAIRKAILG | | | | | | | | | | | | | | 13333 |
| FSESAIRNA | FDCFSESAIRNAILG | | | | | | | | | | | | | | 13334 |
| IVSPRCEYQ | LGHIVSPRCEYQAGH | | | | | | | | | | | | | | 13333 |
| LQYLALAAL | VGSLQYLALAALITP | | | | | | | | | | | | | | 13336 |
| VDRMKIRTW | VWQVDRMKIRTWNSL | | | | | | | | | | | | | | 13337 |
| YWGLQTGER | IKTYWGLQTGERDWH | | | | | | | | | | | | | | 13338 |
| IPLGDARLV | EVHIPLGDARLVITT | | | | | | | | | | | | | | 13339 |
| LQYLALKAL | VGSLQYLALKALVTP | | | | | | | | | | | | | | 13340 |
| WQVDRMRIN | MIVWQVDRMRINTWK | | | | | | | | | | | | | | 13341 |
| IKPKKIKPP | TALIKPKKIKPPLPS | | | | | | | | | | | | | | 13342 |
| VDRMRINTW | VWQVDRMRINTWKSL | | | | | | | | | | | | | | 13343 |
| IGCQHSRIG | IIFRIGCQHSRIGITR | | | | | | | | | | | | | | 13344 |
| WTLELLEEL | YNEWTLELLEELKSE | | | | | | | | | | | | | | 13345 |
| ILQQLLFIH | IIRILQQLLFIHFRI | 0.0054 | | | | 0.0200 | | | | | 0.0084 | | | | 13346 |
| FIHFRIGCQ | QLLFIHFRIGCQHSR | | | | | | | | | | | | | | 13347 |
| YNEWTLELL | REPYNEWTLELLEEL | | | | | | | | | | | | | | 13348 |
| FPRPWLHGL | VRHFPRPWLNGLGQH | | | | | | | | | | | | | | 13349 |
| WEGVEAIIR | GDTWEGVEAIIRTLQ | | | | | | | | | | | | | | 13350 |
| LEELKSEAV | LELLEELKSEAVRHF | | | | | | | | | | | | | | 13551 |
| WAGVEAIIR | GDTWAGVEAIIRILQ | | | | | | | | | | | | | | 13352 |
| YGDTWAGVE | YETYGDTWAGVEAII | | | | | | | | | | | | | | 13353 |
| IGCRHSRIG | HFRTGCRHSRIGITR | | | | | | | | | | | | | | 13354 |
| FIHFRIGCR | QLLFIHFRIGCRHSR | | | | | | | | | | | | | | 13355 |
| FVHFRIGCQ | QLLFVHFPIGCQHSR | | | | | | | | | | | | | | 13356 |
| YGDTWTGVE | YETYGDTWTGVEAII | | | | | | | | | | | | | | 13351 |
| FPRIWLHSL | VRHFPRIWLHSLGQII | | | | | | | | | | | | | | 13358 |
| WALELLEEL | YNEWALELLEELKPIE | | | | | | | | | | | | | | 13359 |
| LVTLLSSSK | EEWLVTLLSSSKLDQ | | | | | | | | | | | | | | 13360 |
| VTLLSSSKL | EWLVTLLSSSKLDQG | | | | | | | | | | | | | | 13361 |
| IIAIVVWTI | VVAIIAIVVWTIVFI | | | | | | | | | | | | | | 13362 |
| VDYRIVIVA | LAKVDYRIVIVAFIV | | | | | | | | | | | | | | 13363 |
| LRQRKIDRL | RKILRQRKIDRLIDR | | | | | | | | | | | | | | 13364 |
| IVVWTIVFI | IIAIVVWTIVFIEYR | | | | | | | | | | | | | | 13365 |
| VVWTIVFIE | IAIVVWTIVFIEYRK | | | | | | | | | | | | | | 13366 |
| IEYRKILRQ | IVFTEYRKILRQRKI | | | | | | | | | | | | | | 13367 |
| ILAIVALVV | SLYILAIVALVYAII | | | | | | | | | | | | | | 13368 |
| WTIVFIEYR | IVVWTIVFIEYRKIL | | | | | | | | | | | | | | 13369 |
| LAIVALVVA | LQILAIVALVVAGII | | | | | | | | | | | | | | 13370 |

[0401] TABLE XXa
HIV DR 3a Motif Peptides

| | | | | | | | | |
|---|---|---|---|---|---|---|---|---|
| | | | Core | | | | | |
| | | Core | Sequence | | | Exemplary | Exemplary | |
| | Core | Sequence | Conservancy | | | Sequence | Sequence | |
| Protein | Sequence | Frequency | (%) | Exemplary Sequence | Position | Frequency | Conservancy (%) | SEQ ID NO. |

| | | | | | | | | |
|---|---|---|---|---|---|---|---|---|
| ENV | VPTDPNPQE | 53 | 83 | HACVPTDPNPQEVVL | 85 | 12 | 19 | 13371 |
| ENV | YLKDQQLLG | 31 | 48 | VERYLKDQQLLGIWG | 669 | 18 | 28 | 13372 |
| ENV | MHEDIISLW | 29 | 45 | VEQMHEDIISLWDQS | 114 | 17 | 27 | 13373 |
| ENV | VSFEPIPIH | 29 | 45 | CPKVSFEPIPIHYCA | 250 | 18 | 28 | 13374 |
| ENV | LAVERYLKD | 26 | 41 | ARVLAVERYLKDQQL | 664 | 15 | 23 | 13375 |
| ENV | VKIEPLGVA | 23 | 36 | YKVVKIEPLGVAPTK | 564 | 15 | 23 | 13376 |
| ENV | VWKEATTTL | 22 | 34 | GVPVWKEATTTLFCA | 52 | 22 | 34 | 13377 |
| ENV | LAWDDLRSL | 20 | 31 | FLALAWDDLRSLCLF | 849 | 19 | 30 | 13378 |
| ENV | LIEESQNQQ | 20 | 31 | IYTLIEESQNQQEKN | 737 | 07 | 11 | 13379 |
| ENV | LGWEGLKYL | 09 | 29 | GLRLGWEGLKYLWNL | 892 | 07 | 23 | 13380 |
| ENV | LELDKWASL | 18 | 28 | QELLELDKWASLWNW | 755 | 07 | 11 | 13381 |
| ENV | YLRDQQLLG | 18 | 28 | VERYLRDQQLLGIWG | 669 | 11 | 17 | 13382 |
| ENV | MWQEVGKAM | 15 | 23 | IINMWQEVGKAMYAP | 492 | 12 | 19 | 13383 |
| ENV | IEEEGGERD | 13 | 20 | PEGIEEEGGERDRDR | 827 | 08 | 13 | 13384 |
| ENV | MNNENNGTN | 01 | 20 | INEMNNENNGThSTW | 212 | 01 | 2 | 13385 |
| ENV | IBEEGGEQD | 12 | 19 | LGRIEEEGGEQDKNR | 827 | 02 | 3 | 13386 |
| ENV | LAEEEVVIR | 12 | 19 | NGSLAEEEVVIRSEN | 309 | 04 | 6 | 13387 |
| ENV | LALDKWASL | 11 | 17 | QDLLALDKWASLWNW | 753 | 05 | 8 | 13388 |
| ENV | LAVERYLRD | 11 | 17 | ARVLAVERYLRDQQL | 664 | 10 | 16 | 13389 |
| ENV | IRShNLTNN | 10 | 16 | EIIIRSENLTNNVKT | 317 | 03 | 5 | 13390 |
| ENV | MEWEREIDN | 10 | 16 | MTWMEWEREIDNYTS | 721 | 03 | 5 | 13391 |
| GAG | INEEAAEWD | 55 | 86 | KETINEEAAEWDRLH | 223 | 18 | 28 | 13392 |
| GAG | FSPEVIPMF | 54 | 84 | EKAFSPEVIPMFSAL | 182 | 36 | 56 | 13393 |
| GAG | VLAEAMSQV | 33 | 52 | KARVLAEAMSQVTNS | 383 | 09 | 14 | 13394 |
| GAG | MLKDTINEE | 32 | 50 | AMQMLKDTINEEAAE | 218 | 30 | 47 | 13395 |
| GAG | VVEEKAFSP | 28 | 44 | WVKVVEEKAFSPEVI | 176 | 28 | 44 | 13396 |
| GAG | LRAEQATQE | 27 | 42 | FKTLRAEQATQEVKN | 325 | 09 | 14 | 13397 |
| GAG | MLKETINEE | 23 | 36 | AMQMLKETINEEAAE | 218 | 22 | 34 | 13398 |
| GAG | VTEEKAFSP | 21 | 33 | WVKVIEEKAFSPEVI | 176 | 20 | 31 | 13399 |
| GAG | VLAEAMSQA | 16 | 25 | KARVLAEAMSQASGA | 383 | 03 | 5 | 13400 |
| GAG | IEEEQNKSK | 15 | 23 | LDKIEEEQNKSKKKA | 203 | 09 | 14 | 13401 |
| GAG | LRAEQATQD | 14 | 22 | FKTLRAEQATQDVKN | 325 | 10 | 16 | 13402 |
| GAG | LRAEQASQE | 12 | 19 | YKTLRAEQASQEVKN | 325 | 12 | 19 | 13403 |
| NEF | YEPDWQNYT | 36 | 56 | TQGYFPDWQNYTPGP | 195 | 33 | 52 | 13404 |
| NEF | FLKEKGGLE | 30 | 47 | LSHFLKEKGGLEGLI | 114 | 15 | 23 | 13405 |
| NEF | FLKEKGGLD | 26 | 41 | LSFFLKEKGGLDGLI | 114 | 14 | 22 | 13406 |
| NEF | FFPDWQNYT | 17 | 27 | TQGFFPDWQNYTPGP | 195 | 17 | 27 | 13407 |
| NEF | VSRDLEKHG | 11 | 17 | VGAVSRDLEKHGAIT | 46 | 11 | 17 | 13408 |
| POL | YMDDLYVGS | 62 | 97 | IYQYMDDLYVGSDLE | 369 | 59 | 92 | 13409 |
| POL | IDPENPYNT | 60 | 94 | ISKIGPENPYNTPVF | 236 | 28 | 44 | 13410 |
| POL | LHPDKWTVQ | 60 | 94 | GYELHPDKWTVQPIQ | 420 | 29 | 45 | 13411 |
| POL | IVTDSQYAL | 59 | 92 | EVNIVTDSQYALGII | 684 | 58 | 91 | 13412 |
| POL | IPAETGQET | 58 | 91 | AEVIPAETGQETAYF | 838 | 55 | 86 | 13413 |
| POL | LTEEKIKAL | 56 | 88 | QWPLTEEKIKALTEI | 210 | 26 | 41 | 13414 |
| POL | IEAEVIPAE | 55 | 86 | SGYIEAEVIPAETGQ | 833 | 51 | 80 | 13415 |
| POL | LFLDGIDKA | 55 | 86 | RXVLFLDGIDKAQEE | 749 | 32 | 50 | 13416 |
| POL | VAKEIVASC | 54 | 86 | PPVVAKEIVASCDKC | 781 | 22 | 34 | 13417 |
| POL | LKGEAMHGQ | 53 | 83 | KCQLKGEAMHGQVDC | 794 | 47 | 73 | 13418 |
| POL | VGSDLEIGQ | 53 | 83 | DLYVGSDLEIGQHRA | 375 | 28 | 44 | 13419 |
| POL | IIRDYGKQM | 50 | 78 | KAKIIRDYGKQMAGD | 1017 | 36 | 56 | 13420 |
| POL | MASDFNLPP | 41 | 73 | WRAMASDFNLPPVVA | 771 | 24 | 38 | 13421 |
| POL | FYVDGAANR | 43 | 61 | AETFYVDGAANRETK | 629 | 33 | 52 | 13422 |
| POL | IHTDNGSNF | 42 | 66 | VKVIHTDNOSNFTSA | 862 | 11 | 27 | 13423 |
| POL | ILKEPVHGV | 41 | 64 | NREILKEPVHDVYYD | 495 | 36 | 56 | 13424 |
| POL | IYQEPFKNL | 40 | 63 | TYQIYQEPFKNLKTG | 530 | 39 | 61 | 13425 |
| POL | VYYDPSKDL | 39 | 61 | VHGVYYDPSKDLIAE | 506 | 26 | 41 | 13426 |
| POL | YVTDRGRQK | 39 | 61 | KAGYVTDRGRQKVVS | 646 | 19 | 30 | 13427 |
| POL | LTEEAELEL | 37 | 58 | IVPLTEEAELELAEN | 481 | 12 | 19 | 13428 |
| POL | V1QDNSDIK | 37 | 58 | GAVVIQDNSDIKVVP | 999 | 37 | 58 | 13429 |
| POL | IATDIQTKE | 35 | 55 | IDIIATDIQTKELQK | 953 | 22 | 34 | 13430 |
| POL | INNETPGIR | 32 | 51 | IPSINNETPGIRYQY | 321 | 31 | 48 | 13431 |
| POL | LIAEIQKQG | 30 | 47 | SKDLIAEIQKQGQGQ | 514 | 09 | 14 | 13432 |
| POL | ICTEMEKEG | 28 | 44 | LVEICTEMEKEGKIS | 221 | 14 | 22 | 13433 |
| POL | VGAETFYVD | 28 | 44 | EPIVGAETFYVDGAA | 624 | 20 | 31 | 13434 |
| POL | TQKETWETW | 27 | 42 | RLPIQKETWETWWTD | 582 | 09 | 14 | 13435 |
| POL | IKQEFGIPY | 26 | 41 | WAGIKQEFGIPYNPQ | 884 | 21 | 33 | 13436 |
| POL | MAGDDCVAG | 25 | 39 | GKQMAGDDCVAGRQD | 1025 | 23 | 36 | 13437 |
| POL | IKKEKVYLA | 20 | 31 | EQLIKKEKVYLAWVP | 115 | 19 | 30 | 13438 |
| POL | MAGDDCVAS | 19 | 30 | GKQMAGDDCVASRQD | 1025 | 19 | 30 | 13439 |
| POL | VPLDKDFRK | 18 | 28 | YFSVPLDKDFRKYTA | 304 | 18 | 29 | 13440 |
| POL | IQQEFGIPY | 16 | 25 | WAGIQQEFGIPYNPQ | 884 | 11 | 11 | 13441 |
| POL | LEKEPIVGA | 16 | 25 | WYQLEKEPIVGAETF | 618 | 16 | 25 | 13442 |
| POL | YQLEKEPIV | 16 | 25 | KLWYQLEKEPIVGAE | 616 | 16 | 25 | 13443 |
| POL | IQKETWEAW | 15 | 23 | KLPIQKETWEAWWTE | 582 | 05 | 8 | 13444 |
| POL | PSSEQTRAN | 14 | 22 | AREFSSEQTRANSPT | 14 | 10 | 16 | 13445 |
| POL | IASDIQTKE | 14 | 22 | IDIIASDIQTKELQK | 953 | 09 | 14 | 13446 |
| POL | IATESIVIW | 14 | 22 | VQKIATESIVIWGKT | 564 | 11 | 17 | 13447 |
| POL | ILIEICGKK | 14 | 22 | YDQILIEICGKKAIG | 146 | 13 | 20 | 13448 |
| POL | VLEEINLPD | 14 | 22 | DDTVLEEINLPGKWK | 116 | 11 | 11 | 13449 |
| POL | IKKEKVYLS | 13 | 20 | EQLIKKEKVYLSWVP | 715 | 07 | 11 | 13450 |
| POL | VLEDINLPG | 13 | 20 | DDTVLEDINLPGKWK | 116 | 13 | 20 | 13451 |
| POL | VLPEKDSWT | 13 | 20 | QPIVLPEKDSWTVND | 431 | 13 | 20 | 13452 |
| POL | VIQONSEYK | 12 | 19 | GAVVIQDNSEIKVVP | 999 | 12 | 19 | 13453 |
| POL | IIKDYGKQM | 11 | 17 | KAKIIKDYGKQMAGA | 1017 | 06 | 9 | 13454 |
| TAT | VERETETDP | 11 | 17 | KEKVERETETDPAVQ | 95 | 01 | 2 | 13455 |
| VIF | LTEDRWNKP | 28 | 44 | VKKLTEDRWNKPQKT | 175 | 09 | 14 | 13456 |
| VIF | YYFDCFSES | 20 | 31 | IHLYYFDCPSESAIR | 112 | 14 | 22 | 13457 |
| VIF | LVEDRWNKP | 11 | 17 | VQKLVEDRWNKPQKT | 175 | 04 | 6 | 13458 |
| VIF | IDPDLADQL | 10 | 16 | STQIDPDLADQLIHL | 100 | 10 | 16 | 13459 |
| VPR | LKNEAVRHF | 18 | 28 | LEELKNEAVRHFPRP | 23 | 10 | 16 | 13460 |
| VPR | LKSEAVRHF | 15 | 23 | LEELKSEAVRHFPRI | 23 | 07 | 11 | 13461 |
| VPR | YIYETYGDT | 14 | 22 | LGQYIYETYGDTWAG | 42 | 07 | 11 | 13462 |
| VPR | LKQEAVRHF | 11 | 17 | LEELKQEAVRHFPRP | 23 | 06 | 9 | 13463 |

[0402] TABLE XXb
HIV DR 3a Motif Peptides with Binding Information

| Core Sequence | Exemplary Sequence | DR1 | DR2wβ1 | DR2w2β2 | DR3 | DR4w4 | DR4w15 | DR5w11 | DR5w12 | SEQ ID NO. | |
|---|---|---|---|---|---|---|---|---|---|---|---|
| VPTDPNPQE | HACVPTDPNPQEVVL | | | | | | | | | 13371 | |
| YLKDQQLLG | VERYLKDQQLLGIWG | | | | | | | | | 13372 | |
| MHEDIISLW | VEQMHEDIISLWDQS | | | | | | | | | 13373 | |
| VSFEPIPIH | CPKVSFEPIPIHYCA | | | | | | | | | 13374 | |
| LAVERYLKD | ARVLAVERYLKDQQL | | | | | | | | | 13375 | |
| VKIEPLGVA | YKVVKIEPLGVAPTK | | | | | | | | | 13376 | |
| VWKEATTTL | GVPVWKEATTTLFCA | | | | | | | | | 13377 | |
| LAWDDLRSL | FLALAWDDLRSLCLF | | | | | | | | | 13378 | |
| LIBESQNQQ | IYTLIEESQNQQEKN | | | | | | | | | 13379 | |
| LGWEGLKYL | GLRLGWEGLKYLWNL | | | | | | | | | 13380 | |
| LELDKWASL | QELLELDKWASLWNW | | | | | | | | | 13381 | |
| YLRDQQLLG | VERYLRDQQLLGIWG | | | | | | | | | 13382 | |
| MWQEVGKAM | IINMWQEVGKAMYAP | | | | | | | | | 13383 | |
| IBEEGGERD | PEGIEEEGGERDRDR | | | | | | | | | 13384 | |
| MNNENNGTN | TNEMNNENNGTNSTW | | | | | | | | | 13385 | |
| IEEEGGEQD | LGRIEEEGGEQDKNR | | | | | | | | | 13386 | |
| LAEEEVVIR | NGSLAEEEVVIRSEN | | | | | | | | | 13387 | |
| LALDKWASL | QDLLALDKWASLWNW | | | | | | | | | 13388 | |
| LAVERYLRD | ARVLAVERYLRDQQL | | | | | | | | | 13389 | |
| LRSENLTNN | EIIIRSENLTNNVKT | | | | | | | | | 13390 | |
| MEWERETDN | MTWMEWEREIDNYTS | | | | | | | | | 13391 | |
| TNEEAAEWD | KETTNEEAAEWDRLH | | | | | | | | | 13392 | |
| FSPEVIPMF | EKAFSPEVIPMFSAL | 0.0086 | | 0.0015 | −0.0130 | 0.0340 | | −0.0010 | | 13393 | |
| VLAEAMSQV | KARVLAEAMSQVTNS | 0.0080 | | | | 0.0120 | | 13394 | | | |
| MLKDTINEE | AMQMLKDTTNEEAAE | | | | | | | | | 13395 | |
| VVEEKAFSP | WVKVVEEKAFSPEVI | 0.0006 | | | | 0.0016 | | | | 13396 | |
| LRAEQATQE | PKTLRAEQATQEVKN | | | | | | | | | 13397 | |
| MLKETTNEE | AMQMLKETINEEAAE | | | | | | | | | 13398 | |
| VIEEKAFSP | WVKVIEEKAFSPEVI | | | | | | | | | 13399 | |
| VLAEAMSQA | KARVLAEAMSQASGA | | | | | | | | | 13400 | |
| IEEEQNKSK | LDKIEEEQNKSKKKA | | | | | | | | | 13401 | |
| LRAEQATQD | FKTLRAEQATQDVKN | | | | | | | | | 13402 | |
| LRAEQASQE | YKTLRAEQASQEVKN | | | | | | | | | 13403 | |
| YFPDWQNYT | TQGYFPDWQNYTPGP | | | | −0.00 17 | | | | | 13404 | |
| FLKEKGGLE | LSHFLKEKGGLEGLI | | | | | | | | | 13405 | |
| FLKEKGGLD | LSFFLKEKGGLDGLI | | | | | | | | | 13406 | |
| FFPDWQNYT | TQGFFPDWQNYTPGP | | | | | | | | | 13407 | |
| VSRDLEKHG | VGAVSRDLEKIHAIT | | | | | | | | | 13408 | |
| YMDDLYVGS | IYQYMDDLYVGSDLE | | | | | | | | | 13409 | |
| IDPENPYNT | ISKIGPENPYNTPVF | 0.0001 | | −0.0014 | −0.0130 | 0.0026 | | −0.0006 | | 13410 | |
| LHPDKWTVQ | GYELHPDKWTVQPIQ | | | | | | | | | 13411 | |
| IVTDSQYAL | EVNIVTDSQYALGII | 0.0002 | 0.0034 | −0.0010 | 0.4100 | −0.0055 | | 0.0006 | | 13412 | |
| IPAETGQET | AEVIPAETGQETAYF | | | | 0.0033 | | | | | 13413 | |
| LTEEKIKAL | QWPLTEEKIKALTEI | | | | | | | | | 13414 | |
| IEAEVIPAE | SGYIEAEVIPAETGQ | | | | | | | | | 13415 | |
| LFLDGIDKA | RKVLFLDGIDKAQEE | | | | | | | | | 13416 | |
| VAKEIVASC | PPVVAKEIVASCDKC | 0.0001 | | −0.0021 | −0.0130 | 0.0085 | | 0.0006 | | 13417 | |
| LKGEAMHGQ | KCQLKOEAMHGQVDC | | | | −0.0017 | | | | | 13418 | |
| VGSDLEIGQ | DLYVGSDLEIGQHRA | | | | | | | | | 13419 | |
| IIRDYGKQM | KAKIIRDYGKQMAGD | | | | | | | | | 13420 | |
| MASDFNLPP | WRAMASDFNLPPVVA | | | | | | | | | 13421 | |
| FYVDGAANR | AETFYVDGAANRETK | 0.0021 | −0.0005 | 0.0046 | 0.3900 | 0.0150 | | −0.0006 | | | 13422 |
| IITDNGSNF | VKVIHTDNGSNFTSA | | | | | | | | | 13423 | |
| ILKEPVHGV | NREILKEPVHGVYYD | 0.3000 | 0.1500 | −0.0014 | 0.1000 | 0.1900 | 0.0300 | −0.0007 | 0.0230 | 13424 | |
| IYQEPFKNL | TYQIYQEPFKNLKTG | | | | −0.0017 | | | | | 13425 | |
| VYYDPSKDL | VHGVYYDPSKDLLAE | | | | | | | | | 13426 | |
| YVTDRGRQK | KAUYVTDRGRQKVVS | | | | | | | | | 13427 | |
| LTEEAELEL | IVPLTEEAELELAEN | | | | | | | | | 13428 | |
| VIQGNSDIK | GAVVIQDNSDIKVVP | 0.0033 | 0.0280 | 0.0014 | 0.3000 | −0.0055 | | −0.0006 | | 13429 | |
| IATDIQTKE | IDHATDIQTKELQK | | | | | | | | | 13430 | |
| INNETPGIR | IPSINNETPGIRYQY | | | | | | | | | 13431 | |
| LIAEIQKQG | SKDLIAEIQKQGQGQ | | | | | | | | | 13432 | |
| ICTEMEKEG | LVEICTEMEKECKIS | | | | −0.0017 | | | | | 13433 | |
| VGAETFYVD | EPIVGAETFYVDGAA | | | | | | | | | 13434 | |
| IQKETWETW | RLPIQKETWETWWTD | | | | | | | | | 13435 | |
| IKQEFGIPY | WAGIKQEFGIPYNPQ | 0.0018 | 0.0018 | 0.1600 | 1.0000 | 0.0140 | | −0.0006 | | 13436 | |
| MAGDDCVAG | GKQMAGDDCVAGRQD | | | | | | | | | 13437 | |
| IKKEKVYLA | EQLIKKEKVYLAWVP | 0.6400 | 0.0800 | 0.0059 | 0.0300 | 4.1000 | | 0.0058 | −0.0045 | 13438 | |
| MAGDDCVAS | GKQMAGDDCVASRQD | | | | | | | | | 13439 | |
| VPLDKDFRK | YFSVPLDKDFRKYTA | | | | | | | | | 13440 | |
| IQQEFGIPY | WAGIQQEFGIPYNPQ | | | | | | | | | 13441 | |
| LEKEPIVGA | WYQLEKEPIVGAETF | | | | | | | | | 13442 | |
| YQLEKEPIV | KLWYQLEKEPIVGAE | | | | | | | | | 13443 | |
| IQKETWEAW | KLPIQKETWEAWWTE | | | | | | | | | 13444 | |
| FSSEQTRAN | AREFSSEQTRANSPT | | | | | | | | | 13445 | |
| IASDIQTKE | IDILASDIQTKELQK | | | | | | | | | 13446 | |
| IATESIVIW | VQKIATESIVIWGKT | | | | | | | | | 13447 | |
| ILIEICGKK | YDQILIEICGKKAIG | | | | | | | | | 13448 | |
| VLEEINLPG | DDTVLEEINLPGKWK | | | | | | | | | 13449 | |
| IKKCKVYLS | EQLIKKEKVYLSWVP | | | | | | | | | 13450 | |
| VLEDINLPG | DDTVLEDINLPGKWK | | | | | | | | | 13451 | |
| VLPEKDSWT | QPIVLPEKDSWTVND | | | | | | | | | 13452 | |
| VIQDNSEIK | GAVVLQDNSEIKVVP | | | | | | | | | 13453 | |
| IIKDYGKQM | KAKIIKDYGKQMAOA | | | | | | | | | 13454 | |
| VERETETDP | KEKVERETETDPAVQ | | | | | | | | | 13455 | |
| LTEDRWNKP | VKKLTEDRWNKPQKT | | | | | | | | | 13456 | |
| YYFDCFSES | IHLYYFDCFSESAIR | | | | | | | | | 13457 | |
| LVEDRWNKP | VQKLVEDRWNKPQKT | | | | | | | | | 13458 | |
| IDPDLADQL | STQIDPDLADQLIHL | | | | | | | | | 13459 | |
| LKNEAVRHF | LEELKNEAVRHFPRP | | | | | | | | | 13460 | |
| LKSEAVRHF | LEELKSEAVRHFPRI | | | | | | | | | 13461 | |
| YIYETYGDT | LGQYIYETYGDTWAG | | | | | | | | | 13462 | |
| LKQEAVRHF | LEELKQEAVRIWPRP | | | | | | | | | 13463 | |

| Core Sequence | DR6w19 | DR7 | DR8w2 | DR9 | DRw53 | SEQ ID NO. |
|---|---|---|---|---|---|---|
| VPTDPNPQE | | | | | | 13371 |
| YLKDQQLLG | | | | | | 13372 |
| MHEDIISLW | | | | | | 13373 |
| VSFEPIPIH | | | | | | 13374 |
| LAVERYLKD | | | | | | 13375 |
| VKIEPLGVA | | | | | | 13376 |
| VWKEATTTL | | | | | | 13377 |
| LAWDDLRSL | | | | | | 13378 |
| LIBESQNQQ | | | | | | 13379 |
| LGWEGLKYL | | | | | | 13380 |
| LELDKWASL | | | | | | 13381 |
| YLRDQQLLG | | | | | | 13382 |
| MWQEVGKAM | | | | | | 13383 |
| IBEEGGERD | | | | | | 13384 |
| MNNENNGTN | | | | | | 13385 |
| IEEEGGEQD | | | | | | 13386 |
| LAEEEVVIR | | | | | | 13387 |
| LALDKWASL | | | | | | 13388 |
| LAVERYLRD | | | | | | 13389 |
| LRSENLTNN | | | | | | 13390 |
| MEWERETDN | | | | | | 13391 |
| TNEEAAEWD | | | | | | 13392 |
| FSPEVIPMF | | 0.0023 | | | | 13393 |
| VLAEAMSQV | | 0.0025 | | | | 13394 |
| MLKDTINEE | | | | | | 13395 |
| VVEEKAFSP | | 0.0003 | | | | 13396 |
| LRAEQATQE | | | | | | 13397 |
| MLKETTNEE | | | | | | 13398 |
| VIEEKAFSP | | | | | | 13399 |
| VLAEAMSQA | | | | | | 13400 |
| IEEEQNKSK | | | | | | 13401 |
| LRAEQATQD | | | | | | 13402 |
| LRAEQASQE | | | | | | 13403 |
| YFPDWQNYT | | | | | | 13404 |
| FLKEKGGLE | | | | | | 13405 |
| FLKEKGGLD | | | | | | 13406 |
| FFPDWQNYT | | | | | | 13407 |
| VSRDLEKHG | | | | | | 13408 |
| YMDDLYVGS | | | | | | 13409 |
| IDPENPYNT | | −0.0005 | | | | 13410 |
| LHPDKWTVQ | | | | | | 13411 |
| IVTDSQYAL | 0.0108 | −0.0014 | −0.0009 | | | 13412 |
| IPAETGQET | | | | | | 13413 |
| LTEEKIKAL | | | | | | 13414 |
| IEAEVIPAE | | | | | | 13415 |
| LFLDGIDKA | | | | | | 13416 |
| VAKEIVASC | | 0.0015 | | | | 13417 |
| LKGEAMHGQ | | | | | | 13418 |
| VGSDLEIGQ | | | | | | 13419 |
| IIRDYGKQM | | | | | | 13420 |
| MASDFNLPP | | | | | | 13421 |
| FYVDGAANR | −0.0002 | −0.0014 | 0.0035 | | | 13422 |
| IITDNGSNF | | | | | | 13423 |
| ILKEPVHGV | 0.0120 | 0.0033 | 0.0010 | 0.0210 | | 13424 |
| IYQEPFKNL | | | | | | 13425 |
| VYYDPSKDL | | | | | | 13426 |
| YVTDRGRQK | | | | | | 13427 |
| LTEEAELEL | | | | | | 13428 |
| VIQGNSDIK | 0.0447 | −0.0014 | −0.0009 | | | 13429 |
| IATDIQTKE | | | | | | 13430 |
| INNETPGIR | | | | | | 13431 |
| LIAEIQKQG | | | | | | 13432 |
| ICTEMEKEG | | | | | | 13433 |
| VGAETFYVD | | | | | | 13434 |
| IQKETWETW | | | | | | 13435 |
| IKQEFGIPY | 0.0123 | −0.0014 | −0.0009 | | | 13436 |
| MAGDDCVAG | | | | | | 13437 |
| IKKEKVYLA | −0.0003 | −0.0005 | −0.0015 | 0.0011 | | 13438 |
| MAGDDCVAS | | | | | | 13439 |
| VPLDKDFRK | | | | | | 13440 |
| IQQEFGIPY | | | | | | 13441 |
| LEKEPIVGA | | | | | | 13442 |
| YQLEKEPIV | | | | | | 13443 |
| IQKETWEAW | | | | | | 13444 |
| FSSEQTRAN | | | | | | 13445 |
| IASDIQTKE | | | | | | 13446 |
| IATESIVIW | | | | | | 13447 |
| ILIEICGKK | | | | | | 13448 |
| VLEEINLPG | | | | | | 13449 |
| IKKCKVYLS | | | | | | 13450 |
| VLEDINLPG | | | | | | 13451 |
| VLPEKDSWT | | | | | | 13452 |
| VIQDNSEIK | | | | | | 13453 |
| IIKDYGKQM | | | | | | 13454 |
| VERETETDP | | | | | | 13455 |
| LTEDRWNKP | | | | | | 13456 |
| YYFDCFSES | | | | | | 13457 |
| LVEDRWNKP | | | | | | 13458 |
| IDPDLADQL | | | | | | 13459 |
| LKNEAVRHF | | | | | | 13460 |
| LKSEAVRHF | | | | | | 13461 |
| YIYETYGDT | | | | | | 13462 |
| LKQEAVRHF | | | | | | 13463 |

[0403] TABLE XXc
HIV DR 3b Motif Peptides

| | | | | | | | | |
|---|---|---|---|---|---|---|---|---|
| | | | Core | | | | | |
| | | Core | Sequence | | | Exemplary | Exemplary | |
| | Core | Sequence | Conservancy | | | Sequence | Sequence | |
| Protein | Sequence | Frequency | (%) | Exemplary Sequence | Position | Frequency | Conservancy (%) | SEQ ID NO. |

| | | | | | | | | |
|---|---|---|---|---|---|---|---|---|
| ENV | MRDNWRSEL | 40 | 63 | GGDMRDNWRSELYKY | 550 | 37 | 38 | 13464 |
| ENV | LTVQARQLL | 36 | 56 | SITLTVQARQLLSGI | 620 | 27 | 42 | 13465 |
| ENV | IEAQQHLLQ | 35 | 55 | LRAIEAQQHLLQLTV | 642 | 34 | 53 | 33466 |
| ENV | IIGDIRQAH | 27 | 44 | TGEIIGDIRQAHCNI | 370 | 07 | 11 | 13467 |
| ENV | VEREKRAVG | 23 | 37 | RRVVEREKRAVGIGA | 582 | 11 | 17 | 13468 |
| ENV | MVEQMHEDI | 23 | 36 | KNNMVEQMHEDIISL | 130 | 39 | 30 | 13469 |
| ENV | AWDDLRSLC | 20 | 31 | LALAWDDLRSLCLFS | 830 | 38 | 28 | 13470 |
| ENV | LEITTHSFN | 20 | 33 | GGDLEITIHSFNCRG | 426 | 30 | 16 | 13471 |
| ENV | YDTEVHNVW | 18 | 28 | AKAYDTEVHNVWATh | 71 | 15 | 23 | 13472 |
| ENV | AEGTDRIIE | 17 | 27 | IAVAEGTDRIIEVVQ | 927 | 02 | 3 | 13473 |
| ENV | VQREKRAVG | 37 | 27 | RRVVQREKRAVGIGA | 582 | 05 | 8 | 13474 |
| ENV | AEGTDRVIE | 15 | 23 | IAVAEGTDRVIEVVQ | 927 | 07 | 11 | 13475 |
| ENV | IEAQQHLLK | 32 | 39 | LRAIEAQQHLLKLTV | 642 | 08 | 13 | 13476 |
| ENV | LKCNDKKFN | 32 | 19 | FAILKCNDKKFNGTG | 269 | 05 | 8 | 13477 |
| GAG | ANPDCKTIL | 45 | 70 | VQNANPDCKTILKAL | 347 | 27 | 42 | 13478 |
| GAG | FYKTLRAEQ | 28 | 44 | VDRFYKTLRAEQASQ | 321 | 39 | 30 | 13479 |
| GAG | APGQMREPR | 27 | 42 | GPIAPGQMREPRGSD | 242 | 39 | 30 | 13480 |
| GAG | FFKTLRAEQ | 27 | 42 | VDRFFKTLRAEQATQ | 323 | 26 | 41 | 13481 |
| GAG | IWPSHKGPP | 23 | 36 | LGKIWPSHKGRPGNP | 470 | 22 | 34 | 13482 |
| GAG | LARNCRAPR | 20 | 32 | EGHLARNCRAPRKKG | 431 | 39 | 30 | 13483 |
| GAG | IAKNCRAPR | 18 | 29 | EGHIAKNCRAPRKKG | 431 | 30 | 16 | 13484 |
| GAG | ATQEVKNWM | 18 | 28 | AEQATQEVKNWMTET | 330 | 34 | 22 | 13485 |
| GAG | ATQDVKNWM | 15 | 23 | AEQATQDVKNWMTDT | 330 | 11 | 37 | 13486 |
| GAG | IARNCRAPR | 33 | 21 | EGHIARNCRAPRKKG | 431 | 33 | 20 | 13487 |
| GAG | LWPSNKGRP | 13 | 20 | LGKIWPSNKGRPGNF | 470 | 33 | 20 | 13488 |
| GAG | ANPDCKSIL | 33 | 37 | VQNANPDCKSILRAL | 347 | 06 | 9 | 13489 |
| GAG | ASQEVKNWM | 33 | 17 | AEQASQEVKNWMTET | 330 | 11 | 37 | 13490 |
| GAG | IWPSSKGRP | 10 | 36 | LGKIWPSSKGRPGNF | 470 | 30 | 36 | 13493 |
| NEF | LIYSKKRQE | 15 | 28 | LDGLIYSKKRQEILD | 171 | 11 | 37 | 13492 |
| NEF | VPVDPREVE | 11 | 17 | FKLVPVDPRBVEEAN | 227 | 06 | 9 | 13493 |
| NEF | MARELHPEY | 30 | 16 | FHHMARELHPEYYKD | 316 | 04 | 6 | 13494 |
| POL | MGYELHPDK | 60 | 94 | FLWMGYELHPDKWTV | 416 | 60 | 94 | 13495 |
| POL | FIHNFKRKG | 58 | 91 | MAVFIHNFKRKGGIG | 930 | 57 | 89 | 13496 |
| POL | MNKELKKII | 56 | 89 | VESMNKELKKIIGQV | 903 | 45 | 70 | 13497 |
| POL | IIGQVRDQA | 44 | 69 | LKKIIGQVRDQAEHL | 910 | 43 | 67 | 13498 |
| POL | YHSNWRAMA | 39 | 61 | HEKYHSNWRAMASDF | 764 | 23 | 36 | 13499 |
| POL | MEKEGKISK | 36 | 56 | CTEMEKEGKISKIGP | 225 | 22 | 34 | 13500 |
| POL | YYRDSRDPI | 34 | 53 | FRVYYRDSRDPLWKG | 975 | 34 | 54 | 13503 |
| POL | ANRETKLGK | 30 | 47 | DGAANRETKLGKAGY | 635 | 28 | 44 | 13502 |
| POL | IGGQLKEAL | 25 | 39 | TIKIGGQLKEALLDT | 99 | 17 | 27 | 13503 |
| POL | LDKDFRKYT | 39 | 30 | SVPLDKDFRKYTAFT | 306 | 37 | 27 | 13504 |
| POL | YYRDSRDPL | 34 | 22 | FRVYYRDSRDPLWKG | 975 | 13 | 23 | 13505 |
| POL | IIGQVREQA | 33 | 20 | LKKIIGQVREQAEHL | 910 | 33 | 20 | 13506 |
| POL | YHNNWRAMA | 10 | 36 | HEKYHNNWRAMASDF | 764 | 06 | 9 | 13507 |
| REV | ARRNRRRRW | 39 | 61 | TRQARRNRRRRWRAR | 38 | 18 | 28 | 13508 |
| REV | ARKNFRRRW | 38 | 28 | TRQARKNRRRRWRAR | 38 | 13 | 20 | 13509 |
| REV | LLKTVRLIK | 30 | 16 | DEELLKTVRLIKFLY | 9 | 04 | 6 | 13530 |
| VIF | ISSEVHIPL | 27 | 42 | HPRISSEVHIPLGDA | 48 | 08 | 33 | 13533 |
| VIF | VSSEVHIPL | 27 | 42 | HPKVSSEVHIPLGEA | 48 | 33 | 17 | 13512 |
| VIF | VSIEWRLRR | 13 | 37 | GHGVSIEWRLRRYST | 85 | 05 | 8 | 13513 |
| VPR | LPSNTRGRG | 01 | 50 | IGILPSNTRGRGRRN | 82 | 01 | 2 | 13514 |
| VPR | LLEELKNEA | 17 | 27 | TLELLEELKNEAVRH | 19 | 12 | 19 | 13515 |
| VPR | LLEELKSEA | 16 | 25 | TLELLEELKSEAVRH | 19 | 15 | 23 | 13516 |
| VPU | AKYDYRIVI | 01 | 33 | DLLAKVDYRIVIVAF | 3 | 01 | 2 | 13517 |
| VPU | AKVDYRLGV | 01 | 33 | NFLAKVDYRLGVCAL | 3 | 01 | 2 | 13518 |
| VPU | ILRQRKIDR | 15 | 23 | YRKILRQRKIDRLID | 42 | 12 | 19 | 13519 |

[0404] TABLE XXd
HIV DR 3b Motif Peptides with Binding Information

| Core Sequence | Exemplary Sequence | DR1 | DR2wβ1 | DR2w2β2 | DR3 | DR4w4 | DR4w15 | DR5w11 | DR5w12 | SEQ ID NO. |
|---|---|---|---|---|---|---|---|---|---|---|
| MRDNWRSEL | GGDMRDNWRSELYKY | | | | | | | | | 13464 |
| LTVQARQLL | SITLTVQARQLLSGI | | | | | | | | | 13465 |
| IEAQQHLLQ | LRAIEAQQHLLQLTV | | | | | | | | | 13466 |
| IIGDIRQAH | TGEIIGDIRQAHCNI | | | | | | | | | 13467 |
| VEREKRAVG | RRVVEREKRAVGIGA | | | | | | | | | 13468 |
| MVEQMHEDI | KNNMVEQMHEDIISL | | | | | | | | | 13469 |
| AWDDLRSLC | LALAWDDLRSLCLFS | | | | | | | | | 13470 |
| LEITTHSFN | GGDLEITTHSFNCRG | | | | | | | | | 13471 |
| YDTEVHNVW | AKAYDTEVHNVWATH | | | | | | | | | 13472 |
| AEGTDRIIE | IAVAEGTDRIIEVVQ | | | | | | | | | 13473 |
| VQREKRAVG | RRVVQREKRAVGIGA | | | | | | | | | 13474 |
| AEOTDRVTE | IAVAEGTDRVIEVVQ | | | | | | | | | 13475 |
| IEAQQHLLK | LRAIEAQQHLLKLTV | | | | | | | | | 13476 |
| LKCNDKKFN | FAILKCNDKKFNGTG | | | | | | | | | 13477 |
| ANPDCKTIL | VQNANPDCKTILKAL | | | | 0.0031 | | | | | 13478 |
| FYKTLRAEQ | VDRFYKTLRAEQASQ | | | | 0.0049 | | | | | 13479 |
| APOQMREPR | GPIAPGQMREPRGSD | | | | −0.0017 | | | | | 13480 |
| FFKTLRAEQ | VDRFFKTLRAEQATQ | | | | | | | | | 13481 |
| TWPSHKGRP | LOKIWPSHKGRPGNF | | | | | | | | | 13482 |
| LARNCRAPR | EGHLARNCRAPRKKG | | | | | | | | | 13483 |
| IAKNCRAPR | EGHIAKNCRAPRKKG | | | | | | | | | 13484 |
| ATQEVKNWM | AEQATQEVKNWMTET | | | | | | | | | 13485 |
| ATQDVKNWM | AEQATQDVKNWMTDT | | | | | | | | | 13486 |
| IARNCRAPR | EGHIARNCRAPRKKG | | | | | | | | | 13487 |
| IWPSNKGRP | LGKIWPSNKGRPGNF | | | | | | | | | 13488 |
| ANPDCKSIL | VQNANPDCKSILRAL | | | | | | | | | 13489 |
| ASQEVKNWM | AEQASQEVKNWMTET | | | | | | | | | 13490 |
| IWPSSKGRP | LGKIWPSSKGRPGNF | | | | | | | | | 13491 |
| LIYSKKRQE | LDGLIYSKKRQEILD | | | | | | | | | 13492 |
| VPVDPREVE | FKLVPVDPRIWEEAN | | | | | | | | | 13493 |
| MARELHPEY | FHHMARELHPEYYKD | | | | | | | | | 13494 |
| MGYELHPDK | FLWMGYELHPDKWTV | | | | −0.0017 | | | | | 13495 |
| FIHNFKRKG | MAVFIHNFKRKGGIG | 0.0009 | | 1.3000 | 0.0470 | 0.0085 | | 6.9000 | | 13496 |
| MNKELKKII | VESMNKELKKIIGQV | | | | | | | | | 13497 |
| IIGQVRDQA | LKKIIGQVRDQAEHL | | | | 0.0700 | | | | | 13498 |
| YHSNWRAMA | HEKYHSNWRAMASDF | | | | 0.0022 | | | | | 13499 |
| MEKEGKISK | CTEMEKBGKISKIGP | | | | 0.0110 | | | | | 13500 |
| YYRDSRDPI | FRVYYRDSRDPIWKG | | | | | | | | | 13501 |
| ANRETKLGK | DGAANRETKLCKAGY | | | | −0.0017 | | | | | 13502 |
| IGGQLKEAL | TIKIGGQLKEALLDT | | | | 0.0090 | | | | | 13503 |
| LDKDFRKYT | SVPLDKGERKYTAFT | | | | | | | | | 13504 |
| YYRDSRDPL | FRVYYRDSRDPLWKG | | | | | | | | | 13505 |
| IIGQVREQA | LKKIIGQVREQAEHL | | | | | | | | | 13506 |
| YHNNWRAMA | HEKYHNNWRAMASDF | | | | | | | | | 13507 |
| ARRNRRRRW | TRQARRNRRRRWRAR | | | | | | | | | 13508 |
| ARKNRRRRW | TRQARKNRRRRWRAR | | | | | | | | | 13509 |
| LLKTVRLIK | DEELLKTVRLIKFLV | | | | | | | | | 13510 |
| ISSEVHIPL | HPRISSEVHIPLGDA | | | | | | | | | 13511 |
| VSSEVHIPL | HPKVSSEVHIPLGEA | | | | | | | | | 13512 |
| VSIEWRLRR | GHGVSIEWRLRRYST | | | | | | | | | 13513 |
| LPSNTRGRG | IGILPSNTRGRGRRN | | | | | | | | | 13514 |
| LLEELKNEA | TLELLEELKNEAVRH | | | | | | | | | 13515 |
| LLEELKSEA | TLELLEELKSEAVRH | | | | | | | | | 13516 |
| AKVDYRIVI | DLLAKVDYRIVIVAF | | | | | | | | | 13517 |
| AKVDYRLGV | NFLAKVDYRLGVGAL | | | | | | | | | 13518 |
| ILRQRKTDR | YRKILRQRKIDRLID | 0.0024 | 0.0740 | 0.0410 | 13.0000 | −0.0055 | | 0.1500 | | 13519 |

| Core Sequence | DRw619 | DR7 | DR8w2 | DR9 | DRw53 | SEQ ID NO. |
|---|---|---|---|---|---|---|
| MRDNWRSEL | | | | | | 13464 |
| LTVQARQLL | | | | | | 13465 |
| IEAQQHLLQ | | | | | | 13466 |
| IIGDIRQAH | | | | | | 13467 |
| VEREKRAVG | | | | | | 13468 |
| MVEQMHEDI | | | | | | 13469 |
| AWDDLRSLC | | | | | | 13470 |
| LEITTHSFN | | | | | | 13471 |
| YDTEVHNVW | | | | | | 13472 |
| AEGTDRIIE | | | | | | 13473 |
| VQREKRAVG | | | | | | 13474 |
| AEOTDRVTE | | | | | | 13475 |
| IEAQQHLLK | | | | | | 13476 |
| LKCNDKKFN | | | | | | 13477 |
| ANPDCKTIL | | | | | | 13478 |
| FYKTLRAEQ | | | | | | 13479 |
| APOQMREPR | | | | | | 13480 |
| FFKTLRAEQ | | | | | | 13481 |
| TWPSHKGRP | | | | | | 13482 |
| LARNCRAPR | | | | | | 13483 |
| IAKNCRAPR | | | | | | 13484 |
| ATQEVKNWM | | | | | | 13485 |
| ATQDVKNWM | | | | | | 13486 |
| IARNCRAPR | | | | | | 13487 |
| IWPSNKGRP | | | | | | 13488 |
| ANPDCKSIL | | | | | | 13489 |
| ASQEVKNWM | | | | | | 13490 |
| IWPSSKGRP | | | | | | 13491 |
| LIYSKKRQE | | | | | | 13492 |
| VPVDPREVE | | | | | | 13493 |
| MARELHPEY | | | | | | 13494 |
| MGYELHPDK | | | | | | 13495 |
| FIHNFKRKG | | 0.0048 | | | | 13496 |
| MNKELKKII | | | | | | 13497 |
| IIGQVRDQA | | | | | | 13498 |
| YHSNWRAMA | | | | | | 13499 |
| MEKEGKISK | | | | | | 13500 |
| YYRDSRDPI | | | | | | 13501 |
| ANRETKLGK | | | | | | 13502 |
| IGGQLKEAL | | | | | | 13503 |
| LDKDFRKYT | | | | | 13504 | |
| YYRDSRDPL | | | | | 13505 | |
| IIGQVREQA | | | | | 13506 | |
| YHNNWRAMA | | | | | 13507 | |
| ARRNRRRRW | | | | | 13508 | |
| ARKNRRRRW | | | | | 13509 | |
| LLKTVRLIK | | | | | 13510 | |
| ISSEVHIPL | | | | | 13511 | |
| VSSEVHIPL | | | | | 13512 | |
| VSIEWRLRR | | | | | 13513 | |
| LPSNTRGRG | | | | | 13514 | |
| LLEELKNEA | | | | | 13515 | |
| LLEELKSEA | | | | | 13516 | |
| AKVDYRIVI | | | | | 13517 | |
| AKVDYRLGV | | | | | 13518 | |
| ILRQRKTDR | 0.0016 | −0.0014 | 0.0270 | | | 13519 |

[0405] TABLE XXI
Population coverage with combined HLA Supertypes

| | PHENOTYPIC FREQUENCY | | | | | |
|---|---|---|---|---|---|---|
| | | North | | | | |
| | | American | | | | |
| HLA-SUPERTYPES | Caucasian | Black | Japanese | Chinese | Hispanic | Average |
| a. Individual Supertypes | | | | | | |
| A2 | 45.8 | 39.0 | 42.4 | 45.9 | 43.0 | 43.2 |
| A3 | 37.5 | 42.1 | 45.8 | 52.7 | 43.1 | 44.2 |
| B7 | 38.6 | 52.7 | 48.8 | 35.5 | 47.1 | 44.7 |
| A1 | 47.1 | 16.1 | 21.8 | 14.7 | 26.3 | 25.2 |
| A24 | 23.9 | 38.9 | 58.6 | 40.1 | 38.3 | 40.0 |
| B44 | 43.0 | 21.2 | 42.9 | 39.1 | 39.0 | 37.0 |
| B27 | 28.4 | 26.1 | 13.3 | 13.9 | 35.3 | 23.4 |
| B62 | 12.6 | 4.8 | 36.5 | 25.4 | 11.1 | 18.1 |
| B58 | 10.0 | 25.1 | 1.6 | 9.0 | 5.9 | 10.3 |
| b. Combined Supertypes | | | | | | |
| A2, A3, B7 | 83.0 | 86.1 | 87.5 | 88.4 | 86.3 | 86.2 |
| A2, A3, B7, A24, B44, A1 | 99.5 | 98.1 | 100.0 | 99.5 | 99.4 | 99.3 |
| A2, A3, B7, A24, B44, A1, | 99.9 | 99.6 | 100.0 | 99.8 | 99.9 | 99.8 |
| B27, B62, B58 | | | | | | |

[0406] TABLE XXIII
Immunogenicity of HIV peptides

| | | | | | Immunogenicity | |
|---|---|---|---|---|---|---|
| | Peptide | Seq ID | Sequence | Protein | patients | transgenic |
| A2 Supermotif | 1261.04 | 14176 | LTFGWCFKL | HIV nef 221 | 4/12 | 3/3 |
| | 1261.15 | 14177 | MASDFNLPPV | hiv pol 774 | 1/15 | 2/6 |
| | 1069.32 | 14178 | VLAEAMSQV | hiv gag 386 | 6/19 | 3/3 |
| | 1261.16 | 14179 | CTLNFPISPI | hiv pol 182 | 0/1 | 1/6 |
| | 1261.02 | 14180 | LLQLTVWGJ | HIV env 65l | 2/8 | 1/6 |
| | 1261.13 | 14181 | KLVGKLNWA | HIV pol 448 | 3/15 | 3/3 |
| | 1211.04 | 14182 | KLTPLCVTL | HIV env 134 | 2/12 | 2/6 |
| | 1261.08 | 14183 | ALVEICTEM | HIV pol 220 | 0/2 | 1/6 |
| | 1261.11 | 14184 | AIIRILQQL | HIV vpr 59 | 5/9 | 0/6 |
| | 1261.09 | 14185 | LVGPTPVNI | HIV pol 163 | 1/9 | 1/6 |
| | 1261.12 | 14186 | RILQQLLFI | HIV vpr 62 | 6/20 | 2/6 |
| | 1261.05 | 14187 | TLNFPISPI | HIV pol 183 | 1/7 | 0/6 |
| | 1261.03 | 14188 | MTNNPPIPV | HIV gag 271 | 2/17 | 4/6 |
| | 1261.17 | 14189 | KMIGGIGGFI | HIV pol 132 | 2/7 | 0/6 |
| | 941.03 | 14190 | ILKEPVHGV | HIV pol 498 | 8/19 | 3/6 |
| | 1261.10 | 14191 | RAMASDFNL | HIV pol 772 | 2/9 | 0/6 |
| | 1261.07 | 14192 | KAACWWAGI | HIV pol 879 | 1/8 | 0/6 |

[chemical structure]

| | | | | | |
|---|---|---|---|---|---|
| DR Supermotif | 27 | 14204 | KRWILGLNKIVRMY | HIV gag 298 | 3/13 |
| | 27 | 14205 | GEIYKRWILGLNKI | HIV gag 294 | 2/13 |
| | 27 | 14206 | WEFVNTPPLVKLWYQ | HIV pol 596 | 2/13 |
| | 27 | 14207 | QKQITKIQNFRVYYR | HIV pol 956 | 3/13 |
| | 1280 | 14208 | KVYLAWVPAHKGIGG | HIV pol 712 | 3/13 |
| | 27 | 14209 | EKVYLAWVPAHKGIG | HIV pol 711 | 1/13 |
| | 27 | 14210 | QGQMVHQAISPRTLN | HIV gag 171 | 4/13 |
| | 27 | 14211 | SPAIFQSSMTKILEP | HIV pol 335 | 3/13 |
| | 27 | 14212 | FRKYTAFTIPSINNE | HIV pol 303 | 3/13 |
| | 27 | 14213 | HSNWRAMASDFNLPP | HIV pol 758 | 3/13 |
| | 27 | 14214 | KTAVQMAVFIHNFKR | HIV pol 915 | 4/13 |

[0407] TABLE XXIV
MIIC-peptide binding assays: cell lines and radiolabeled ligands.

| | | | | Radiolabeled peptide | | |
|---|---|---|---|---|---|---|
| Species | Antigen | Allele | Cell line | Source | Seq ID | Sequence |

A. Class I binding assays

| | | | | | | |
|---|---|---|---|---|---|---|
| Human | A1 | A*0101 | Steinlin | Hu. J chain 102—110 | 14215 | YTAVVPLVY |
| | A2 | A*0201 | JY | HBVc 18—27 F6 -> Y | 14216 | FLPSDYFPSV |
| | A2 | A*0202 | P815 (transfected) | HBVc 18—27 F6 -> Y | 14217 | FLPSDYFPSV |
| | A2 | A*0203 | FUN | HBVc 18—27 F6 -> Y | 14218 | FLPSDYFPSV |
| | A2 | A*0206 | CLA | HBVc 18—27 F6 -> Y | 14219 | FLPSDYFPSV |
| | A2 | A*0207 | 721.221 (transfected) | HBVc 18—27 F6 -> Y | 14220 | FLPSDYFPSV |
| | A3 | | GM3107 | non-natural (A3CON1) | 14221 | KVFPYALINK |
| | A11 | | BVR | non-natural (A3CON1) | 14222 | KVFPYALINK |
| | A24 | A*2402 | KAS116 | non-natural (A24CON1) | 14223 | AYIDNYNKF |
| | A31 | A*3101 | SPACH | non-natural (A3CON1) | 14224 | KVFPYALINK |
| | A33 | A*3301 | LWAGS | non-natural (A3CON1) | 14225 | KVFPYALINK |
| | A28/68 | A*6801 | CIR | HBVc 141—151 T7 -> Y | 14226 | STLPETYVVRR |
| | A28/68 | A*6802 | AMAI | HBV pol 646—654 C4 -> A | 14227 | FTQAGYPAL |
| | B7 | B*0702 | GM3107 | A2 sigal seq. 5—13 | 14228 | APRTLVYLL |
| | | | | (L7 -> Y) | | |
| | B8 | B*0801 | Steinlin | HIVgp 586—593 Y1 -> F, | 14229 | FLKDYQLL |
| | | | | Q5 -> Y | | |
| | B27 | B*2705 | LG2 | R 60s | 14230 | FRYNGLIHR |
| | B35 | B*3501 | CIR, BVR | non-natural (B35CON2) | 14231 | FPFKYAAAF |
| | B35 | B*3502 | TISI | non-natural (B35CON2) | 14232 | FPFKYAAAF |
| | B35 | B*3503 | EHM | non-natural (B35CON2) | 14233 | FPFKYAAAF |
| | B44 | B*4403 | PITOUT | EF-1 G6 -> Y | 14234 | AEMGKYSFY |
| | B51 | | KAS116 | non-natural (B35CON2) | 14235 | FPFKYAAAF |
| | B53 | B*5301 | AMAI | non-natural (B35CON2) | 14236 | FPFKYAAAF |
| | B54 | B*5401 | KT3 | non-natural (B35CON2) | 14237 | FPFKYAAAF |
| | Cw4 | Cw*0401 | CIR | non-natural (C4CON1) | 14238 | QYDDAVYKL |
| | Cw6 | Cw*0602 | 721.221 transfected | non-natural (C6CON1) | 14239 | YRHDGGNVL |
| | Cw7 | Cw*0702 | 721.221 transfected | non-natural (C6CON1) | 14240 | YRHDGGNVL |
| Mouse | D^{h} | | EL4 | Adenovirus EIA | 14241 | SGPSNTYPEI |
| | | | | P7 -> Y | | |
| | K^{h} | | EL4 | VSV NP 52—59 | 14242 | RGYVFQGL |
| | D^{d} | | P815 | HIV-IIIB ENV | 14243 | RGPYRAFVTI |
| | | | | G4 -> Y | | |
| | K^{d} | | P815 | non-natural (KdCON1) | 14244 | KFNPMKTYI |
| | L^{d} | | P815 | HBVs 28—39 | 14245 | IPQSLDSYWTSL |

B. Class II binding assays

| | | | | | | |
|---|---|---|---|---|---|---|
| Human | DR1 | DRB1*0101 | LG2 | HA Y307—319 | 14246 | YPKYVKQNTLKLAT |
| | DR2 | DRB1*1501 | L466.1 | MBP 88-102Y | 14247 | VVHFFKNIVTPRTPPY |
| | DR2 | DRB1*1601 | L242.5 | non-natural (760.16) | 14248 | YAAFAAAKTAAAFA |
| | DR3 | DRB1*0301 | MAT | MT 65kD Y3-13 | 14249 | YKTIAFDEEARR |
| | DR4w4 | DRB1*0401 | Preiss | non-natural (717.01) | 14290 | YARFQSQTTLKQKT |
| | DR4w10 | DRB1*0402 | YAR | non-natural (717.10) | 14251 | YARFQRQTTLKAAA |
| | DR4w14 | DRB1*0404 | BIN 40 | non-natural (717.01) | 14252 | YARFQSQTTLKQKT |
| | DR4w15 | DRB1*0405 | KT3 | non-natural (717.01) | 14253 | YARFQSQTTLKQKT |
| | DR7 | DRB1*0701 | Pitout | Tet. tox. 830—843 | 14254 | QYIKANSKFIGITE |
| | DR8 | DRB1*0802 | OLL | Tet. tox. 830—843 | 14255 | QYIKANSKFIGITE |
| | DR8 | DRB1*0803 | LUY | Tet. tox. 830—843 | 14256 | QYIKANSKFIGITE |
| | DR9 | DRB1*0901 | HID | Tet. tox. 830—843 | 14257 | QYIKANSKFIGITE |
| | DR11 | DRB1*1101 | Sweig | Tet. tox. 830—843 | 14258 | QYIKANSKFIGITE |
| | DR12 | DRB1*1201 | Herluf | unknown eluted peptide | 14259 | EALIHQLKINPYVLS |
| | DR13 | DRB1*1302 | H0301 | Tet. tox. 830—843 | 14260 | QYIKANAKFIGITE |
| | | | | S -> A | | |
| | DR51 | DRB5*0101 | GM3107 or L416.3 | Tet. tox. 830—843 | 14261 | QYIKANAKEIGITE |
| | DR51 | DRB5*0201 | L255.1 | HA 307—319 | 14262 | PKYVKQNTLKLAT |
| | DR52 | DRB3*0101 | MAT | Tet. tox. 830—843 | 14263 | NGQIGNDPNRDIL |
| | DR53 | DRB4*0101 | L257.6 | non-natural (717.01) | 14264 | YARFQSQTTLKQKT |
| | DQ3.1 | DQA1*0301/DQB1*0301 | PF | non-natural (ROIV) | 14265YAHAAHAAHAAHAAHAA | |
| Mouse | 1A^{b} | | DB27.4 | non-natural (ROIV) | 14266 | YAHAAIIAAHAAHAAHAA |
| | 1A^{d} | | A20 | non-natural (ROIV) | 14267 | YAHAAHAAHAAHAAHAA |
| | 1A^{k} | | CH-12 | HEL 46-61 | 14268 | YNTDGSTDYGILQINSR |
| | 1A^{s} | | LS102.9 | non-natural (ROIV) | 14269 | YAHAAHAAHAAHAAHAA |
| | 1A^{u} | | 91.7 | non-natural (ROIV) | 14270 | YAHAAHAAHAAHAAHAA |
| | 1E^{d} | | A20 | Lambda repressor 12—26 | 14271 | YLEDARRKKAIYEKKK |
| | 1E^{k} | | CH-12 | Lambda repressor 12—26 | 14272 | YLEDARRKKAIYEKKK |

[0408] TABLE XXV
Monoclonal antibodies used in MHC purification.

| Monoclonal antibody | Specificity |
|---|---|
| W6/32 | HLA-class I |
| B123.2 | HLA-B and C |
| IVD12 | HLA-DQ |
| LB3.1 | HLA-DR |
| M1/42 | H-2 class I |
| 28-14-8S | H-2 D^{b} and L^{d} |
| 34-5-8S | H-2 D^{d} |
| B8-24-3 | H-2 K^{b} |
| SF1-1.1.1 | H-2 K^{d} |
| Y-3 | H-2 K^{b} |
| 10.3.6 | H-2 IA^{k} |
| 14.4.4 | H-2 IE^{d}, IE^{K} |
| MKD6 | H-2 IA^{d} |
| Y3JP | H-2 IA^{b}, IA^{s}, IA^{u} |

[0409] TABLE XXVI
The table lists the 64 fully represented aligned amino acid sequences that were identified for Motif analysis. In-
cluded are the aligned amino acid sequence ID number, the complete nucleotide sequence name it was derived
from, the accession numbers for the sequence, the subtype, country and the total length of all nine sequences.

| | ID Number | Name | Accession Numbers | Subtype | Country | Length |
|---|---|---|---|---|---|---|
| 1 | A.KE.Q23-CxC-CG | HIVQ2317 | AF004885 | A | KE | 3584 |
| 2 | A.SE.UGSE8891 | AUGSE8891 | AF069673 | A | SE | 3584 |
| 3 | A.UG.92UG037 | H92UG037 | U51190 | A | UG | 3584 |
| 4 | A.UG.U455 | HIVU455A | M62320 | A | UG | 3584 |
| 5 | AC.IN.21301 | 21301 | AF067156 | AC | IN | 3584 |
| 6 | AC.RW.92RW009 | 92RW009 | U88823 | AC | RW | 3584 |
| 7 | AC.ZM.ZAM184 | ZAM184 | U86780 | AC | ZM | 3584 |
| 8 | ADI.ZR.MAL | HIVMALCG | K03456, X04415 | ADI | ZR | 3584 |
| 9 | AE.CF.90CR402 | HIV90CF4O2 | U51188 | AE | CF | 3584 |
| 10 | AE.TH.93TH253 | H93TH253 | U51 189 | AE | TH | 3584 |
| 11 | AE.TH.CM240 | HIV1CM240 | U54771 | AE | TH | 3584 |
| 12 | AG.DJ.DJ263 | DJ263 | AF063223 | AG | DJ | 3584 |
| 13 | AG.DJ.DJ264 | HDJ264 | AF063224 | AG | DJ | 3584 |
| 14 | AG.NG.92NG003 | 92NG003 | U88825 | AG | NG | 3584 |
| 15 | AG.NG.92NG083 | H92NG083 | U88826 | AG | NG | 3584 |
| 16 | AG.NG.IBNG | HIVIBNG | L39106 | AG | NG | 3584 |
| 17 | AGI.CY.94CY0323 | 94CY032-3 | AF049337 | AGI | CY | 3584 |
| 18 | AGI.ZR.Z321 | HIVU76035, Z321B | U76035 | AGI | ZR | 3584 |
| 19 | AGJ.AU.BFP90 | HIVBFP9O | AF064699 | AGJ | AU | 3584 |
| 20 | B.CN.RL42 | HCHRL42CG | U71182 | B | CN | 3584 |
| 21 | B.DE.D31 | HIV1D31 | U43096 | B | DE | 3584 |
| 22 | B.DE.HAN | HIVHAN2 | U43141 | B | DE | 3584 |
| 23 | B.FR.HXB2R | HIVHXB2 | AF033819, K03455, M38432 | B | FR | 3584 |
| 24 | B.GA.OYI | HIVOYI | M26727 | B | GA | 3584 |
| 25 | B.GB.CAM1 | HIVCAM1 | D00917, D10112 | B | GB | 3584 |
| 26 | B.GB.MANC | HIV1MANC | U23487 | B | GB | 3584 |
| 27 | B.NL.ACH32OA | HIV1ACH32OA | U34604 | B | NL | 3584 |
| 28 | B.US.ADA | HIV1AD8 | AF004394 | B | US | 3584 |
| 29 | B.US.DH123 | HIV1DH123 | AF069140 | B | US | 3584 |
| 30 | B.US.JRCSF | HIVJRCSF | M38429 | B | US | 3584 |
| 31 | B.US.JRFL | HIVJRFL | U63632 | B | US | 3584 |
| 32 | B.US.MN | HIVMN | M17449 | B | US | 3584 |
| 33 | B.US.P896 | HIV1896 | M96155, U39362 | B | US | 3584 |
| 34 | B.US.RF | HIVRF | M12508 | B | US | 3584 |
| 35 | B.US.SF2 | HIVSF2CG | K02007 | B | US | 3584 |
| 36 | B.US.WEAU16O | HIVWEAU160 | U21135 | B | US | 3584 |
| 37 | B.US.WR27 | HIV1WR27 | U26546 | B | US | 3584 |
| 38 | B.US.YU2 | HIVYU2 | M93258 | B | US | 3584 |
| 39 | BF.BR.93BR029.4 | 93BR029 | AF005495 | BF | BR | 3584 |
| 40 | C.BR.92BR025 | H92BR025 | U52953 | C | BR | 3584 |
| 41 | C.BW.BW96BW0502 | 96BW0502 | AF110967 | C | BW | 3584 |
| 42 | C.ET.ETH2220 | HIVETH2220 | U46016 | C | ET | 3584 |
| 43 | C.IN.11246 | 1N11246 | AF067159 | C | IN | 3584 |
| 44 | C.IN.21068 | C1N21068 | AF067155 | C | IN | 3584 |
| 45 | C.IN.301904 | 301904 | AF067157 | C | IN | 3584 |
| 46 | C.IN.301905 | CIN301905 | AF067158 | C | IN | 3584 |
| 47 | C.IN.301999 | CIN301999 | AF067154 | C | IN | 3584 |
| 48 | D.UG.94UG1141 | 94UG114 | U88824 | D | UG | 3584 |
| 49 | D.ZR.84ZR085 | 84ZR085 | U88822 | D | ZR | 3584 |
| 50 | D.ZR.ELI | HIVELICG | K03454, X04414 | D | ZR | 3584 |
| 51 | D.ZR.NDK | HIVNDK | M27323 | D | ZR | 3584 |
| 52 | F.BR.93BR0201 | 93BR020 | AF005494 | F | BR | 3584 |
| 53 | F.FN.FIN9363 | FIN9363 | AF075703 | F | FN | 3584 |
| 54 | G.BE.DRCBL | DRCBL | AF084936 | G | BE | 3584 |
| 55 | G.FI.HH87931 | HH8793 | AF061640, AF061641 | G | FI | 3584 |
| 56 | G.SE.SE6165 | SE6165 | AF061642 | G | SE | 3584 |
| 57 | H.BE.VI991 | VI991 | VI991 | H | BE | 3584 |
| 58 | H.BE.VI997 | VI997 | VI997 | H | BE | 3584 |
| 59 | H.CF.90CF056 | 90CF056 | AF005496 | H | CF | 3584 |
| 60 | J.SE.SE91733 | SE91733 | AF082395 | J | SE | 3584 |
| 61 | J.SE.SE92809 | SE92809 | AF082394 | J | SE | 3584 |
| 62 | N.CM.YBF3O | NCMYBF3O | AJ006022 | N | CM | 3584 |
| 63 | O.CM.ANT7OC | HIVANT7OC | L20587 | O | CM | 3584 |
| 64 | 0.CM.MVP518O | HIVMVP518O | L20571 | O | CM | 3584 |

[0410] TABLE XXVII
in vitro binding of conserved HIV derived peptides to HLA-A2 supertype alleles

| | | | | |
|---|---|---|---|---|
| | | Conserva- | | |
| pro- | 1st | tion (%) | A2-supertype binding capacity (IC50 nM) | alleles |

| | | | | | | | | | | | | | |
|---|---|---|---|---|---|---|---|---|---|---|---|---|---|
| peptide | AA | tein | Position | Seq ID | sequence | total | B | A*0201 | A*0202 | A*0203 | A*0206 | A6802 | bound |

| | | | | | | | | | | | | | |
|---|---|---|---|---|---|---|---|---|---|---|---|---|---|
| 1261.14 | 10 | NEF | 221 | 14273 | LTFGWCFKLV | 55 | 74 | 294.1 | 48.9 | 185.2 | 57.8 | 6.2 | 5 |
| 1261.04 | 9 | NEF | 221 | 14274 | LTFGWCFKL | 61 | 74 | 35.7 | 33.1 | 4545.5 | 205.6 | 5.6 | 4 |
| 1261.06 | 9 | POL | 316 | 14275 | YTAFTIPSI | 58 | 68 | 26.3 | 6.1 | 9.1 | 7 | 16.7 | 5 |
| 1261.15 | 10 | POL | 774 | 14276 | MASDFNLPPV | 39 | 68 | 62.5 | 22.6 | 55.6 | 33.6 | 18.2 | 5 |
| 1069.32 | 9 | GAG | 386 | 14277 | VLAEAMSQV | 52 | 74 | 66.6 | 82.7 | 15.2 | 115.6 | 363.6 | 5 |
| 1261.16 | 10 | POL | 182 | 14278 | CTLNFPISPI | 94 | 100 | 147 | 23.9 | 30.3 | 8.4 | 100 | 5 |
| 1261.02 | 9 | ENV | 651 | 14279 | LLQLTVWGI | 53 | 63 | 9.8 | 215 | 43.5 | 24.7 | 645.2 | 4 |
| 1261.13 | 9 | POL | 448 | 14280 | KLVGKLNWA | 95 | 95 | 59.5 | 12.6 | 5.9 | 39.8 | 3076.9 | 4 |
| 1211.04 | 9 | ENV | 134 | 14281 | KLTPLCVTL | 81 | 95 | 102 | 126.5 | 66.7 | 185 | 20000 | 4 |
| 1261.08 | 9 | POL | 220 | 14282 | ALVEICTEM | 23 | 79 | 217.3 | 187 | 140.8 | 264.3 | 2857.1 | 4 |
| 1261.11 | 9 | VPR | 59 | 14283 | AIIRILQQL | 61 | 74 | 333.3 | 22.6 | 41.7 | 38.5 | 547.9 | 4 |
| 1261.09 | 9 | POL | 163 | 14284 | LVGPTPVNI | 84 | 100 | 454.5 | 153.6 | 19.2 | 2846.2 | 67.8 | 4 |
| 1261.12 | 9 | VPR | 62 | 14285 | RILQQLLFI | 56 | 74 | 19.2 | 1535.7 | 125 | 37 | 1818.2 | 3 |
| 1261.05 | 9 | POL | 183 | 14286 | TLNFPISPI | 97 | 100 | 75.7 | 1482.8 | 1.1 | 1947.4 | 57.1 | 3 |
| 1261.03 | 9 | GAG | 271 | 14287 | MTNNPPIPV | 31 | 89 | 166.6 | 7166.7 | 33.3 | 1608.7 | 12.1 | 3 |
| 1261.17 | 10 | POL | 132 | 14288 | KMIGGIGGFI | 97 | 95 | 172.4 | 54.4 | 4.8 | 770.8 | 3333.3 | 3 |
| 941.03 | 9 | POL | 498 | 14289 | ILKEPVHGV | 64 | 79 | 192.3 | 2388.9 | 6.7 | 37000 | 363.6 | 3 |
| 1260.10 | 9 | POL | 772 | 14290 | RAMASDFNL | 64 | 79 | 217.3 | 116.2 | 25000 | 52.1 | 3076.9 | 3 |
| 1261.07 | 9 | POL | 879 | 14291 | KAACWWAGI | 49 | 79 | 277.7 | 1075 | 83.3 | 160.9 | 2666.7 | 3 |
| 1211.09 | 10 | ENV | 814 | 14292 | SLLNATDIAV | 22 | 68 | 9.8 | 1303 | 238.1 | 28.5 | 5479.4 | 3 |
| 1211.05 | 9 | ENV | 608 | 14293 | FLGAAGSTM | 86 | 100 | 73.5 | 3583.3 | 1.5 | 4111.1 | 66666.7 | 2 |
| 25.0053 | 9 | VPR | 66 | 14294 | QLLFIHFRI | 69 | 89 | 94.3 | 21500 | 25000 | 1608.7 | 476.2 | 2 |
| 25.0139 | 10 | GAG | 270 | 14295 | WMTNNPPIPV | 31 | 89 | 98 | 3071.4 | 16.9 | 18500 | 2222.2 | 2 |
| 1069.33 | 10 | POL | 993 | 14296 | LLWKGEGAVV | 95 | 100 | 111.1 | 632.4 | 25 | 770.8 | 3636.4 | 2 |
| 25.0142 | 10 | NEF | 219 | 14297 | PLTFGWCFKL | 61 | 74 | 142.8 | 741.4 | 4761.9 | 3700 | 47.6 | 2 |
| 1069.34 | 9 | POL | 993 | 14298 | LLWKGEGAV | 97 | 100 | 172.4 | 10750 | 21.7 | 1608.7 | 2666.7 | 2 |
| 25.0161 | 10 | POL | 452 | 14299 | KLNWASQIYA | 42 | 84 | 217.3 | 3909.1 | 400 | 6166.7 | 3076.9 | 2 |
| 1211.082 | 9 | GAG | 79 | 14300 | SLYNTVATL | 34 | 58 | 277.7 | 3583.3 | 50 | 37000 | 100000 | 2 |
| 25.0037 | 9 | GAG | 486 | 14301 | FLQSRPEPT | 44 | 68 | 454.5 | 10750 | 32.3 | 18500 | 3076.9 | 2 |
| 25.0046 | 9 | POL | 91 | 14302 | TLWQRPLVT | 61 | 68 | 270.2 | 21500 | 2500 | 18500 | 2857.1 | 1 |

[0411] TABLE XXVIII
in vitro binding of conserved HIV derived peptides to HLA-A3 supertype alleles

| | | | | |
|---|---|---|---|---|
| | 1st | Conservation | | |
| pro- | Posi- | (%) | A3-supertype binding capacity (IC50 nM) | alleles |

| | | | | | | | | | | | | | |
|---|---|---|---|---|---|---|---|---|---|---|---|---|---|
| peptide | AA | tein | tion | Seq ID | sequence | total | B | A*0301 | A*1101 | A*3101 | A*3301 | A*6801 | bound |

| | | | | | | | | | | | | | |
|---|---|---|---|---|---|---|---|---|---|---|---|---|---|
| 1273.01 | 9 | GAG | 163 | 14303 | MVHQAISPR | 42 | 58 | 61.1 | 89.6 | 18.0 | 13.8 | 9.5 | 5 |
| 1193.0200 | 9 | POL | 572 | 14304 | IVIWGKTPK | 75 | 79 | 129.4 | 16.2 | 18.2 | 96.7 | 242.4 | 5 |
| 1193.03 | 9 | POL | 931 | 14305 | AVFIHNFKR | 97 | 100 | 64.7 | 3.3 | 5.1 | 107.4 | 4.2 | 5 |
| 1193.01 | 9 | POL | 724 | 14306 | YLAWVPAHK | 34 | 95 | 142.9 | 105.3 | 327.3 | 33.0 | 2.0 | 5 |
| 1211.32 | 10 | POL | 971 | 14307 | KIQNFRVYYR | 81 | 95 | 343.8 | 28.6 | 2.7 | 341.2 | 210.5 | 5 |
| 1069.49 | 10 | POL | 929 | 14308 | QMAVFIHNFK | 94 | 100 | 9.2 | 8.5 | 268.7 | 432.8 | 400.0 | 4 |
| 1273.03 | 10 | GAG | 162 | 14309 | QMVHQAISPR | 42 | 58 | 42.3 | 6000.0 | 243.2 | 290.0 | 186.0 | 4 |
| 1193.09 | 9 | POL | 353 | 14310 | MTKILEPFR | 67 | 84 | 13750.0 | 375.0 | 81.8 | 69.0 | 25.8 | 4 |
| 966.01 | 9 | POL | 347 | 14311 | AIFQSSMTK | 56 | 79 | 10.0 | 10.0 | 12000.0 | 96666.7 | 242.4 | 3 |
| 940.03 | 10 | NEF | 100 | 14312 | QVPLRPMTYK | 72 | 79 | 18.0 | 9.5 | 1836.7 | 2230.8 | 133.3 | 3 |
| 1069.43 | 10 | ENV | 48 | 14313 | TVYYGVPVWK | 64 | 95 | 11.0 | 3.5 | 1636.4 | 10357.1 | 14.5 | 3 |
| 1069.48 | 10 | POL | 931 | 14314 | AVFIHNFKRK | 91 | 100 | 114.6 | 20.7 | 1125.0 | 5000.0 | 307.7 | 3 |
| 1273.05 | 9 | POL | 99 | 14315 | TIKIGGQLK | 27 | 63 | 40.7 | 181.8 | 18000.0 | 36250.0 | 72.7 | 3 |
| 1273.06 | 9 | ENV | 64 | 14316 | TLFCASDAK | 81 | 84 | 118.3 | 11.3 | 10588.2 | 22307.7 | 190.5 | 3 |
| 1273.07 | 10 | ENY | 61 | 14317 | TTLFCASDAK | 78 | 84 | 119.6 | 27.3 | 9473.7 | 14500.0 | 140.4 | 3 |
| 1273.04 | 9 | ENV | 878 | 14318 | RIVELLGRR | 34 | 89 | 200.0 | 600.0 | 138.5 | 13809.5 | 444.4 | 3 |
| 1273.09 | 10 | POL | 98 | 14319 | VTIKIGGQLK | 27 | 63 | 297.3 | 28.6 | 10588.2 | 11600.0 | 125.0 | 3 |
| 1273.02 | 9 | POL | 246 | 14320 | NTPVFAIKK | 58 | 94.7 | 333.3 | 100.0 | 30000.0 | 48333.3 | 4.7 | 3 |
| 1150.14 | 9 | POL | 930 | 14321 | MAVFIHNFK | 94 | 100 | 647.1 | 20.0 | 375.0 | 517.9 | 2.5 | 3 |
| 1273.08 | 9 | VIF | 7 | 14322 | VMIVWQVDR | 69 | 95 | 3235.3 | 272.7 | 3.8 | 5.3 | 2424.2 | 3 |
| 1069.47 | 11 | ENV | 47 | 14323 | VTVYYGVPVWK | 64 | 94 | 84.6 | 11.3 | 4615.4 36250.0 170.2 | 3 | | |
| 1069.42 | 11 | POL | 722 | 14324 | KVYLAWVPAHK | 32 | 89 | 3.5 | 7.6 | 163.6 | 3580.2 | 8000.0 | 3 |
| 1069.44 | 9 | POL | 855 | 14325 | KLAGRWPVK | 78 | 68 | 8.5 | 133.3 | 500.0 | 72500.0 | 80000.0 | 3 |

[0412] TABLE XXIX
in vitro binding of conserved HIV derived peptides to HLA-B7 supertype alleles

| | | |
|---|---|---|
| | Conserva- | |
| 1st | tion (%) | B7-supertype binding capacity (IC50 nM) |

| | | | | | | | | | | | | | |
|---|---|---|---|---|---|---|---|---|---|---|---|---|---|
| peptide | AA | protein | Position | Seq ID | sequence | total | B | B*0702 | B*3501 | B*5101 | B*5301 | B*5401 | bound |

| | | | | | | | | | | | | | |
|---|---|---|---|---|---|---|---|---|---|---|---|---|---|
| 1146.01 | 9 | NEF | 94 | 14326 | FPVRPQVPL | 75 | 74 | 15.7 | 43.0 | 11.6 | 481.9 | 71.4 | 5 |
| 1296.01 | 9 | ENV | 259 | 14327 | IPIHYCAPA | 56 | 42 | 423 | 343 | 153 | — | 3.7 | 4 |
| 15.0268 | 10 | GAG | 545 | 14328 | YPLASLRSLF | 15 | 32 | 392.9 | 480.0 | 39.3 | 150.0 | 714.3 | 4 |
| 1261.01 | 9 | POL | 186 | 14329 | FPISPIETV | 88 | 95 | 3437.5 | 1043.5 | 148.6 | 251.4 | 9.1 | 3 |
| 1296.02 | 9 | ENV | 250 | 14330 | CPKVSFEPI | 47 | 79 | 100.0 | 5142.9 | 161.8 | 2447.4 | 100.0 | 3 |
| 1296.03 | 11 | POL | 893 | 14331 | IPYNPQSQGVV | 92 | 89 | 458.3 | 72000.0 | 119.6 | 46500.0 | 66.7 | 3 |
| 29.0028 | 8 | REV | 75 | 14332 | VPLQLPPL | 56 | 68 | 112.2 | 6000.0 | 0.8 | 46500.0 | 270.3 | 3 |
| 1292.13 | 9 | GAG | 237 | 14333 | HPVHAGPIA | 30 | 74 | 50.0 | 11.6 | 13750.0 | 4428.6 | 4.3 | 3 |

[0413] TABLE XXX
A1-motif peptides

| | | | | Conservancy | | |
|---|---|---|---|---|---|---|
| Peptide | Seq ID | Sequence | Protein | Total | Clade B | IC50 nM |
| 1.0431 | 14334 | EVNIVTDSQY | HIV pol 1187 | 83 | 93 | 472 |
| 1.0014 | 14335 | FRDYVDRFY | HIV gag 298 | 51 | 96 | 278 |

[chemical structure]

| | | | | | | |
|---|---|---|---|---|---|---|
| 1069.26 | 14338 | VTVLDVGDAY | HIV pol 265 | 96 | 93 | 439 |

[0414] TABLE XXXI
A24-motif peptides

| | | | | Conservancy | | |
|---|---|---|---|---|---|---|
| Peptide | Seq ID | Sequence | Protein | Total | Clade B | IC50 nM |
| 25.0113 | 14339 | IWGCSGKLI | HIV env 69 | 69 | 91 | 444 |
| 25.0127 | 14340 | IYETYGDTW | HIV vpr 92 | 92 | 100 | 207 |
| 1069.60 | 14341 | IYQEPFKNL | HIV pol 1036 | 74 | 87 | 444 |
| 25.0128 | 14342 | PYNEWTLEL | HIV vpr 56 | 56 | 71 | 86 |
| 25.0123 | 14343 | PYNTPVFAI | HIV pol 74 | 74 | 100 | 387 |

[chemical structure]

| | | | | | | |
|---|---|---|---|---|---|---|
| 1069.59 | 14346 | TYQIYQEPPF | HIV pol 1033 | 78 | 93 | 67 |

[chemical structure]

| | | | | | | |
|---|---|---|---|---|---|---|
| 25.0219 | 14349 | YWQATWIPEW | HIV pol 96 | 96 | 93 | 182 |

[0415] TABLE XXXII
Immunogenicity of A2-supertype cross-reactive binding peptides

| | | | | Conservancy | | | Immunogenicity | |
|---|---|---|---|---|---|---|---|---|
| Peptide | SEQ ID | Sequence | Protein | Total | Clade B | XRN | patients | transgenic |

[chemical structure]

| | | | | | | | | |
|---|---|---|---|---|---|---|---|---|
| 1261.06 | 14352 | YTAFTIPSI | HIV pol 316 | 58 | 68 | 5 | 0/1 | 0/6 |
| 1261.15 | 14353 | MASDFNLPPV | HIV pol 774 | 39 | 68 | 5 | 1/15 | 2/6 |
| 1069.32 | 14354 | VLAEAMSQV | HIV gag 386 | 52 | 74 | 5 | 6/19 | 3/3 |
| 1261.16 | 14355 | CTLNFPISPI | HIV pol 182 | 94 | 100 | 5 | 0/1 | 1/6 |
| 1261.02 | 14356 | LLQLTVWGI | HIV env 651 | 53 | 63 | 4 | 2/8 | 1/6 |
| 1261.13 | 14357 | KLVGKLNWA | HIV pol 448 | 95 | 95 | 4 | 3/15 | 3/3 |
| 1211.04 | 14358 | KLTPLCVTL | HIV env 134 | 85 | 95 | 4 | 2/12 | 2/6 |
| 1261.08 | 14359 | ALVEICTEM | HIV pol 220 | 23 | 79 | 4 | 0/2 | 1/6 |
| 1261.11 | 14360 | AIIRILQQL | HIV vpr 59 | 61 | 74 | 4 | 5/9 | 0/6 |
| 1261.09 | 14361 | LVGPTPVNI | HIV pol 163 | 84 | 100 | 4 | 1/9 | 1/6 |
| 1261.12 | 14362 | RILQQLLFI | HIV vpr 62 | 56 | 74 | 3 | 6/20 | 2/6 |
| 1261.05 | 14363 | TLNFPISPI | HIV pol 183 | 97 | 100 | 3 | 1/7 | 0/6 |
| 1261.03 | 14364 | MTNNPPIPV | HIV gag 271 | 31 | 89 | 3 | 2/17 | 4/6 |
| 1261.17 | 14365 | KMIGGIGGFI | HIV pol 132 | 97 | 95 | 3 | 2/7 | 0/6 |
| 941.03 | 14366 | ILKEPVHGV | HIV pol 498 | 64 | 79 | 3 | 8/19 | 3/6 |
| 1261.10 | 14367 | RAMASDFNL | HIV pol 772 | 64 | 79 | 3 | 2/9 | 0/6 |
| 1261.07 | 14368 | KAACWWAGI | HIV pol 879 | 49 | 79 | 3 | 1/8 | 0/6 |
| 1211.09 | 14369 | SLLNATDIAV | HIV env 814 | 22 | 68 | 3 | | |

[0416] TABLE XXXIII
Immunogenicity of HIV-derived A3-supertype peptides

| | | | | Conservancy | | | Immunogenicity | |
|---|---|---|---|---|---|---|---|---|
| Peptide | SEQ ID | Sequence | Protein | Total | Clade B | XRN | transgenic | patients |

[chemical structure]

| | | | | | | | | |
|---|---|---|---|---|---|---|---|---|
| 1193.09 | 14380 | MTKILEPFR | HIV pol 353 | 67 | 84 | 4 | 0/8 | |
| 966.01 | 14381 | AIFQSSMTK | HIV pol 347 | 56 | 79 | 3 | 5/6 | 1/6 |
| 940.03 | 14382 | QVPLRPMTYK | HIV nef 100 | 72 | 79 | 3 | 0/6 | 6/10 |
| 1069.44 | 14383 | KLAGRWPVK | HIV pol 855 | 78 | 68 | 3 | | |
| 1273.02 | 14384 | NTPVFAIKK | HIV pol 246 | 58 | 95 | 3 | 0/6 | |
| 1273.08 | 14385 | VMIVWQVDR | HIV vif 7 | 69 | 95 | 3 | 0/6 | |
| 1273.04 | 14386 | RIVELLGRR | HIV env 878 | 34 | 89 | 3 | | |

[chemical structure]

[0417] TABLE XXXIV
HLA-DR screening panels

| Screening | | | Representative Assay | | Phenotypic Frequencies | | | | | |
|---|---|---|---|---|---|---|---|---|---|---|
| Panel | Antigen | Alleles | Allele | Alias | Cauc. | Blk. | Jpn. | Chn. | Hisp. | Avg. |
| Primary | DR1 | DRB1*0101-03 | DRB1*0101 | (DR1) | 18.5 | 8.4 | 10.7 | 4.5 | 10.1 | 10.4 |
| | DR4 | DRB1*0401-12 | DRB1*0401 | (DR4w4) | 23.6 | 6.1 | 40.4 | 21.9 | 29.8 | 24.4 |
| | DR7 | DRB1*0701-02 | DRB1*0701 | (DR7) | 26.2 | 11.1 | 1.0 | 15.0 | 16.6 | 14.0 |
| | Panel total | | | | 59.6 | 24.5 | 49.3 | 38.7 | 51.1 | 44.6 |
| Secondary | DR2 | DRB1*1501-03 | DRB1*1501 | (DR2w2 β1) | 19.9 | 14.8 | 30.9 | 22.0 | 15.0 | 20.5 |
| | DR2 | DRB5*0101 | DRB5*0101 | (DR2w2 β2) | — | — | — | — | — | — |
| | DR9 | DRB1*09011, 09012 | DRB1*0901 | (DR9) | 3.6 | 4.7 | 24.5 | 19.9 | 6.7 | 11.9 |
| | DR13 | DRB1*1301-06 | DRB1*1302 | (DR6w19) | 21.7 | 16.5 | 14.6 | 12.2 | 10.5 | 15.1 |
| | Panel total | | | | 42.0 | 33.9 | 61.0 | 48.9 | 30.5 | 43.2 |
| Tertiary | DR4 | DRB1*0405 | DRB1*0405 | (DR4w15) | — | — | — | — | — | — |
| | DR8 | DRB1*0801-5 | DRB1*0802 | (DR8w2) | 5.5 | 10.9 | 25.0 | 10.7 | 23.3 | 15.1 |
| | DR11 | DRB1*1101-05 | DRB1*1101 | (DR5w11) | 17.0 | 18.0 | 4.9 | 19.4 | 18.1 | 15.5 |
| | Panel total | | | | 22.0 | 27.8 | 29.2 | 29.0 | 39.0 | 29.4 |
| Quarternary | DR3 | DRB1*0301-2 | DRB1*0301 | (DR3w17) | 17.7 | 19.5 | 0.4 | 7.3 | 14.4 | 11.9 |
| | DR12 | DRB1*1201-02 | DRB1*1201 | (DR5w12) | 2.8 | 5.5 | 13.1 | 17.6 | 5.7 | 8.9 |
| | Panel total | | | | 20.2 | 24.4 | 13.5 | 24.2 | 19.7 | 20.4 |

[0418] TABLE XXXV
cross-reactive HLA-DR binding peptides

| | | | | Binding capacity (IC50 nM) | | | | | | |
|---|---|---|---|---|---|---|---|---|---|---|
| Peptide | SEQ ID | Sequence | Protein | DR1 | DR2w2β1 | DR2w2β2 | DR3 | DR4w4 | DR4w15 | DR5w11 |
| 27.0313 | 14393 | KRWIILGLNKIVRMY | HIV gag 298 | 4.2 | 5.1 | 24 | 188 | 633 | 404 | 54 |
| 27.0354 | 14394 | WEFVNTPPLVKLWYQ | HIV pol 596 | 7.2 | 222 | 2.1 | 13636 | 28 | 20 | 317 |
| 27.0377 | 14395 | QKQITKIQNFRVYYR | HIV pol 956 | 2.9 | 3.4 | 80 | — | 357 | 49 | 53 |
| 1280.03 | 14396 | KVYLAWVPAHKGIGG | HIV pol 712 | 8.3 | 25 | 24 | — | 156 | 165 | 71 |
| 27.0311 | 14397 | GEIYKRWIILGLNKI | HIV gag 294 | 82 | 138 | 225 | — | 1667 | 380 | 213 |
| 27.0361 | 14398 | EKVYLAWVPAHKGIG | HIV pol 711 | 3.6 | 21 | 4.9 | 3226 | 9.3 | 27 | 37 |
| 27.0297 | 14399 | QHLLQLTVWGIKQLQ | HIV env 729 | 6.1 | 21 | 690 | — | 1316 | 345 | 2128 |
| 27.0304 | 14400 | QGQMVHQAISPRTLN | HIV gag 171 | 72 | 65 | 13 | 17647 | 60 | 400 | — |
| 27.0344 | 14401 | SPAIFQSSMTKILEP | HIV pol 335 | 357 | 217 | 667 | — | 3571 | 109 | 741 |
| F091.15 | 14402 | IKQFINMWQEVGKAMY | HIV env 566 | 128 | 217 | 206 | — | 417 | 271 | 4878 |
| 27.0341 | 14403 | FRKYTAFTIPSINNE | HIV pol 303 | 185 | 70 | 4167 | — | 294 | 136 | 1818 |
| 27.0364 | 14404 | HSNWRAMASDFNLPP | HIV pol 758 | 33 | — | 125 | — | 11 | 15 | 95 |
| 27.0373 | 14405 | KTAVQMAVFIHNFKR | HIV pol 915 | 161 | 650 | 690 | — | 909 | 452 | 182 |
| | | | | Binding capacity (IC50 nM) | | | | | | |
| Peptide | SEQ ID | Sequence | Protein | DR5w12 | DR6w19 | DR7 | DR8w2 | DR9 | DR53 | bound |
| 27.0313 | 14393 | KRWIILGLNKIVRMY | HIV gag 298 | 124 | 0.36 | 379 | 49 | 58 | | 12 |
| 27.0354 | 14394 | WEFVNTPPLVKLWYQ | HIV pol 596 | 1355 | 90 | 15 | 350 | 39 | | 10 |
| 27.0377 | 14395 | QKQITKIQNFRVYYR | HIV pol 956 | 124 | 25 | 25 | 75 | 577 | | 11 |
| 1280.03 | 14396 | KVYLAWVPAHKGIGG | HIV pol 712 | 12598 | 2500 | 179 | 196 | 250 | | 9 |
| 27.0311 | 14397 | GEIYKRWIILGLNKI | HIV gag 294 | 1656 | 98 | 192 | 63 | 536 | | 9 |
| 27.0361 | 14398 | EKVYLAWVPAHKGIG | HIV pol 711 | 6478 | 3500 | 18 | 31 | 144 | | 9 |
| 27.0297 | 14399 | QHLLQLTVWGIKQLQ | HIV env 729 | 1064 | 350 | 44 | 907 | 375 | | 8 |
| 27.0304 | 14400 | QGQMVHQAISPRTLN | HIV gag 171 | — | 412 | 455 | 7313 | 117 | | 8 |
| 27.0344 | 14401 | SPAIFQSSMTKILEP | HIV pol 335 | — | 13 | 68 | 3267 | 33 | | 8 |
| F091.15 | 14402 | IKQFINMWQEVGKAMY | HIV env 566 | — | 1000 | — | 350 | 5769 | 104 | 8 |
| 27.0341 | 14403 | FRKYTAFTIPSINNE | HIV pol 303 | — | — | 30 | 803 | 39 | | 7 |
| 27.0364 | 14404 | HSNWRAMASDFNLPP | HIV pol 758 | — | 4375 | 472 | 1960 | 872 | | 7 |
| 27.0373 | 14405 | KTAVQMAVFIHNFKR | HIV pol 915 | 18625 | 125 | 1786 | 1441 | 2586 | | 7 |

A dash indicates IC50 > 20 μM

[0419] TABLE XXXVI
DR3 binding peptides

| | | | | |
|---|---|---|---|---|
| Peptide | Seq ID | Sequence | Protein | DR3 |

| | | | | |
|---|---|---|---|---|
| 35.0135 | 14406 | YRKILRQRKIDRLID | HIV vpu 31 | 23 |
| 35.0131 | 14407 | WAGIKQEFGIPYNPQ | HIV pol 874 | 300 |
| 35.0127 | 14408 | EVNIVTDSQYALGII | HIV pol 674 | 732 |
| 35.0125 | 14409 | AETFYVDGAANRETK | HIV pol 619 | 769 |
| 35.0133 | 14410 | GAVVIQDNSDLKVVP | HIV pol 989 | 1000 |

[0420] TABLE XXXVII
Immunogenicity of HIV-derived DR-supermotif peptides

| | | | | | | DR | |
|---|---|---|---|---|---|---|---|
| | | | | Conservation(%) | | Alleles | Patient |
| Peptide | Seq ID | Sequence | Protein | total | clad B | bound | Immunogenicity |

[chemical structure]

| | | | | | | | |
|---|---|---|---|---|---|---|---|
| 27.0354 | 14113 | WEFVNTPPLVKLWYQ | HIV pol 596 | 79 [89] | 84 [95] | 10 | 3/13 |
| 27.0377 | 14114 | QKQITKIQNFRVYYR | HIV pol 956 | 56 [67] | 95 [95] | 11 | 3/13 |

[chemical structure]

| | | | | | | | |
|---|---|---|---|---|---|---|---|
| 27.0304 | 14117 | QGQMVHQAISPRTLN | HIV gag 171 | 41 [42] | 52 [58] | 8 | 4/13 |
| 27.0344 | 14118 | SPAIFQSSMTKILEP | HIV pol 335 | 52 [59] | 79 [78] | 8 | 3/13 |
| 27.0341 | 14119 | FRKYTAFTIPSINNE | HIV pol 303 | 59 [58] | 68 [68] | 7 | 3/13 |
| 27.0364 | 14120 | HSNWRAMASDFNLPP | HIV pol 758 | 48 [67] | 68 [79] | 7 | 3/13 |
| 27.0373 | 14121 | KTAVQMAVFIHNFKR | HIV pol 915 | 87 [95] | 94 [100] | 7 | 4/13 |

¹conservation of core region

[0421] TABLE XXXVIII
Candidate CTL Epitopes

| | | | | |
|---|---|---|---|---|
| Restriction | Peptide | Protein | Seq ID | Sequence |

| | | | | |
|---|---|---|---|---|
| HLA-A2 | 1069.32 | HIV gag 386 | 14122 | VLAEAMSQV |
| ″ | 1261.03 | HIV gag 271 | 14123 | MTNNPPIPV |
| ″ | 1261.15 | HIV pol 774 | 14124 | MASDFNLPPV |
| ″ | 1261.13 | HIV pol 448 | 14125 | KLVGKLNWA |
| ″ | 1261.09 | HIV pol 163 | 14126 | LVGPTPVNI |
| ″ | 941.03 | HIV pol 498 | 14127 | ILKEPVHGV |
| ″ | 1261.07 | HIV pol 879 | 14128 | KAACWWAGI |
| ″ | 1261.17 | HIV pol 132 | 14129 | KMIGGIGGFI |
| ″ | 1261.10 | HIV pol 772 | 14130 | RAMASDFNL |
| ″ | 1261.05 | HIV pol 183 | 14131 | TLNFPISPI |
| ″ | 1211.04 | HIV env 134 | 14132 | KLTPLCVTL |
| ″ | 1261.02 | HIV env 651 | 14133 | LLQLTVWGI |
| ″ | 1211.09 | HIV env 163 | 14134 | SLLNATDIAV |
| ″ | 1261.04 | HIV nef 221 | 14135 | LTFGWCFKL |
| ″ | 1261.11 | HIV vpr 59 | 14136 | AIIRILQQL |
| ″ | 1261.12 | HIV vpr 62 | 14137 | RILQQLLFI |
| HLA-A3 | 1069.49 | HIV pol 929 | 14138 | QMAVFIHNFF |
| ″ | 1069.42 | HIV pol 722 | 14139 | KVYLAWVPAI |
| ″ | 1211.32 | HIV pol 971 | 14140 | KIQNFRVYYR |
| ″ | 1193.09 | HIV pol 353 | 14141 | MTKILEPFR |
| ″ | 966.01 | HIV pol 347 | 14142 | AIFQSSMTK |
| ″ | 1273.09 | HIV pol 98 | 14143 | VTIKIGGQLK |
| ″ | 1273.07 | HIV env 61 | 14144 | TTLFCASDAK |
| ″ | 1069.47 | HIV env 47 | 14145 | VTVYYGVPVV |
| ″ | 940.03 | HIV nef 100 | 14146 | QVPLRPMTYK |
| ″ | 1273.08 | HIV vif 7 | 14147 | VMIVWQVDR |
| ″ | 1273.03 | HIV gag 162 | 14148 | QMVHQAISPF |
| HLA-B7 | 15.0268 | HIV gag 545 | 14149 | YPLASLRSLF |
| ″ | 1292.13 | HIV gag 237 | 14150 | HPVHAGPIA |
| ″ | 1261.01 | HIV pol 186 | 14151 | FPISPIETV |
| ″ | 1296.03 | HIV pol 893 | 14152 | IPYNPQSQGV |
| ″ | 1296.01 | HIV env 259 | 14153 | IPIHYCAPA |
| ″ | 1296.02 | HIV env 250 | 14154 | CPKVSFEPI |
| ″ | 1146.01 | HIV nef 94 | 14155 | FPVRPQVPL |
| ″ | 29.0028 | HIV rev 75 | 14156 | VPLQLPPL |
| HLA-A1 | 1.0431 | HIV pol 684 | 14157 | EVNIVTDSQY |
| ″ | 1.0014 | HIV gag 317 | 14158 | FRDYVDRFY |
| ″ | 1069.27 | HIV pol 368 | 14159 | VIYQYMDDLY |
| ″ | 1069.26 | HIV pol 295 | 14160 | VTVLDVGDAY |
| HLA-A24 | 1069.60 | HIV pol 533 | 14161 | IYQEPFKNL |
| ″ | 25.0123 | HIV pol 244 | 14162 | PYNTPVFAI |
| ″ | 1069.59 | HIV pol 530 | 14163 | TYQIYQEPF |
| ″ | 25.0219 | HIV pol 597 | 14164 | YWQATWIPEV |
| ″ | 25.0113 | HIV env 681 | 14165 | IWGCSGKLI |
| ″ | 1069.57 | HIV env 671 | 14166 | RYLKDQQLL |
| ″ | 25.0115 | HIV env 55 | 14167 | VWKEATTTLF |
| ″ | 25.0127 | HIV vpr 46 | 14168 | IYFTYGDTW |
| ″ | 25.0128 | HIV vpr 14 | 14169 | PYNEWTLEL |

[0422] TABLE XXXIX
HTL Candidate Epitopes

| | | | | |
|---|---|---|---|---|
| Selec- | | | | |
| tion | | | | |
| Criteria | Peptide | Seq ID | Sequence | Protein |

| | | | | |
|---|---|---|---|---|
| DR | 27.0313 | 14170 | KRWIILGLNKIVRMY | HIV gag 298 |
| | 27.0354 | 14171 | WEFVNTPPLVKLWYQ | HIV pol 596 |
| | 27.0377 | 14172 | QKQITKIQNFRVYYR | HIV pol 956 |
| | 1280.03 | 14173 | KVYLAWVPAHKGIGG | HIV pol 712 |
| | 27.0311 | 14174 | GE1YKRWIILGLNKI | HIV gag 294 |
| | 27.0361 | 14175 | EKVYLAWVPAHKGIG | HIV pol 711 |
| | 27.0297 | 14176 | QHLLQLTVWGIKQLQ | HIV env 729 |
| | 27.0304 | 14177 | QGQMVHQAISPRTLN | HIV gag 171 |
| | 27.0344 | 14178 | SPAIFQSSMTKILEP | HIV pol 335 |
| | F091.15 | 14179 | IKQFLNMWQEVGKAMY | HIV env 566 |
| | 27.0341 | 14180 | FRKYTAFTIPSINNE | HIV pol 303 |
| | 27.0364 | 14181 | HSNWRAMASDFNLPP | HIV pol 758 |
| | 27.0373 | 14182 | KTAVQMAVFIHNFKR | HIV pol 915 |
| DR3 | 35.0135 | 14183 | YRKILRQRKIDRLID | HIV vpu 31 |
| | 35.0131 | 14184 | WAGIKQEFGIPYNPQ | HIV pol 874 |
| | 35.0127 | 14185 | EVNIVTDSQYALGII | HIV pol 674 |
| | 35.0125 | 14186 | AETFYVDGAANRETK | HIV pol 619 |
| | 35.0133 | 14187 | GAVVIQDNSDIKVVP | HIV pol 989 |

[0423] TABLE XL
Estimated population coverage by a panel of HIV derived HTL epitopes

| | | Representative | No. of | Population coverage (phenotypic frequency) | | | | | |
|---|---|---|---|---|---|---|---|---|---|
| Antigen | Alleles | assay | epitopes² | Cauc. | Blk. | Jpn. | Chn. | Hisp. | Avg. |
| DR1 | DRB1*0101-03 | DR1 | 13 | 18.5 | 8.4 | 10.7 | 4.5 | 10.1 | 10.4 |
| DR2 | DRB1*1501-03 | DR2w2 β1 | 12 | 19.9 | 14.8 | 30.9 | 22.0 | 15.0 | 20.5 |
| DR2 | DRD5*0101 | DR2w2 β2 | 12 | — | — | — | — | — | — |
| DR3 | DRB1*0301-2 | DR3 | 5 | 17.7 | 19.5 | 0.40 | 7.3 | 14.4 | 11.9 |
| DR4 | DRB1*0401-12 | DR4w4 | 10 | 23.6 | 6.1 | 40.4 | 21.9 | 29.8 | 24.4 |
| DR4 | DRB1*0401-12 | DR4w15 | 13 | — | — | — | — | — | — |
| DR7 | DRB1*0701-02 | DR7 | 11 | 26.2 | 11.1 | 1.0 | 15.0 | 16.6 | 14.0 |
| DR8 | DRB1*0801-5 | DR8w2 | 9 | 5.5 | 10.9 | 25.0 | 10.7 | 23.3 | 15.1 |
| DR9 | DRB1*09011, 09012 | DR9 | 11 | 3.6 | 4.7 | 24.5 | 19.9 | 6.7 | 11.9 |
| DR11 | DRB1*1101-05 | DR5w11 | 9 | 17.0 | 18.0 | 4.9 | 19.4 | 18.1 | 15.5 |
| DR13 | DRB1*1301-06 | DR6wl9 | 8 | 21.7 | 16.5 | 14.6 | 12.2 | 10.5 | 15.1 |
| Total¹ | | | | 98.5 | 95.1 | 97.1 | 91.3 | 94.3 | 95.1 |

¹Total opulation coverage has been adjusted to acount for the presence of DRX in many ethnic populations. It has been assumed that the range of specificities represented by DRX alleles will mirror those of previously characterized HLA-DR alleles. The proportion of DRX incorporated under each motif is representative of the frequency of the motif in the remainder of the population. Total coverage has not been adjusted to account for unknown gene types.
²Number of epitopes represents a minimal estimate, considering only the epitopes shown in Table 13. Additional alleles possibly bound by nested epitopes have not been accounted.

1-40. (canceled)

41. An isolated peptide less than 15 amino acids in length comprising a sequence selected from the group consisting of:

| | |
|---|---|
| VLAEAMSQV | (SEQ ID NO:14422) |
| ILKEPVHGV | (SEQ ID NO:14457) |
| KVYLAWVPAHK | (SEQ ID NO:14439) |
| KIQNFRVYYR | (SEQ ID NO:14440) |
| VTVYYGVPVWK | (SEQ ID NO:14445) |
| and | |
| QMAVFIHNFK. | (SEQ ID NO:14438) |

42. A composition comprising the peptide of claim 41 and one or more members selected from the group consisting of:
(a) an immunogenic peptide;
(b) a spacer molecule;
(c) a carrier;
(d) a lipid;
(e) a liposome; and
(f) an antigen presenting cell.

43. A composition according to claim 42, wherein said immunogenic peptide comprises a T helper cell epitope.

44. A composition according to claim 43, wherein said T helper cell epitope is a universal T helper cell epitope.

45. A composition according to claim 42, wherein said immunogenic peptide comprises a CTL epitope.

46. A composition according to claim 45, wherein said CTL epitope comprises a sequence selected from the group consisting of:

| | |
|---|---|
| VLAEAMSQV | (SEQ ID NO:14422) |
| ILKEPVHGV | (SEQ ID NO:14457) |
| KVYLAWVPAHK | (SEQ ID NO:14439) |
| KIQNFRVYYR | (SEQ ID NO:14440) |
| VTVYYGVPVWK | (SEQ ID NO:14445) |
| and | |
| QMAVFIHNFK. | (SEQ ID NO:14438) |

47. A composition according to claim 42, wherein said antigen presenting cell is a dendritic cell.

48. An isolated nucleic acid minigene construct which encodes a peptide epitope, wherein said peptide epitope comprises a sequence selected from the group consisting of:

| | |
|---|---|
| VLAEAMSQV | (SEQ ID NO:14422) |
| ILKEPVHGV | (SEQ ID NO:14457) |
| KVYLAWVPAHK | (SEQ ID NO:14439) |
| KIQNFRVYYR | (SEQ ID NO:14440) |
| VTVYYGVPVWK | (SEQ ID NO:14445) |
| and | |
| QMAVFIHNFK. | (SEQ ID NO:14438) |

49. An isolated nucleic acid minigene construct according to claim 48, wherein said construct also encodes a second peptide epitope.

50. An isolated nucleic acid minigene construct according to claim 49, wherein said second peptide epitope comprises a T helper cell epitope.

51. An isolated nucleic acid minigene construct according to claim 50, wherein said T helper cell epitope is a universal T helper cell epitope.

52. An isolated nucleic acid minigene construct according to claim 49, wherein said second peptide epitope comprises a CTL epitope.

53. An isolated nucleic acid minigene construct according to claim 52, wherein said CTL epitope comprises a sequence selected from the group consisting of:

| | |
|---|---|
| VLAEAMSQV | (SEQ ID NO:14422) |
| ILKEPVHGV | (SEQ ID NO:14457) |
| KVYLAWVPAHK | (SEQ ID NO:14439) |
| KIQNFRVYYR | (SEQ ID NO:14440) |
| VTVYYGVPVWK | (SEQ ID NO:14445) |
| and | |
| QMAVFIHNFK. | (SEQ ID NO:14438) |

The application's sequence listing, which the Patent Office published only in electronic form, follows.

SEQUENCE LISTING (14528 sequences)

SEQ ID NO: 1 - protein, 8 aa, HUMAN IMMUNODEFICIENCY VIRUS
KLWVTVYY

SEQ ID NO: 2 - protein, 8 aa, HUMAN IMMUNODEFICIENCY VIRUS
NLWVTVYY

SEQ ID NO: 3 - protein, 8 aa, HUMAN IMMUNODEFICIENCY VIRUS
DTEVHNVW

SEQ ID NO: 4 - protein, 8 aa, HUMAN IMMUNODEFICIENCY VIRUS
VTENFNMW

SEQ ID NO: 5 - protein, 8 aa, HUMAN IMMUNODEFICIENCY VIRUS
RIGPGQTF

SEQ ID NO: 6 - protein, 8 aa, HUMAN IMMUNODEFICIENCY VIRUS
GIGPGQTF

SEQ ID NO: 7 - protein, 8 aa, HUMAN IMMUNODEFICIENCY VIRUS
SIGSGQAF

SEQ ID NO: 8 - protein, 8 aa, HUMAN IMMUNODEFICIENCY VIRUS
KLREIRQF

SEQ ID NO: 9 - protein, 8 aa, HUMAN IMMUNODEFICIENCY VIRUS
STNGTETF

SEQ ID NO: 10 - protein, 8 aa, HUMAN IMMUNODEFICIENCY VIRUS
AVGIGAVF

SEQ ID NO: 11 - protein, 8 aa, HUMAN IMMUNODEFICIENCY VIRUS
HLLKLTVW

SEQ ID NO: 12 - protein, 8 aa, HUMAN IMMUNODEFICIENCY VIRUS
HLLQLTVW

SEQ ID NO: 13 - protein, 8 aa, HUMAN IMMUNODEFICIENCY VIRUS
HMLQLTVW

SEQ ID NO: 14 - protein, 8 aa, HUMAN IMMUNODEFICIENCY VIRUS
RVLAVERY

SEQ ID NO: 15 - protein, 8 aa, HUMAN IMMUNODEFICIENCY VIRUS
NVPWNSSW

SEQ ID NO: 16 - protein, 8 aa, HUMAN IMMUNODEFICIENCY VIRUS
EIWDNMTW

SEQ ID NO: 17 - protein, 8 aa, HUMAN IMMUNODEFICIENCY VIRUS
DLLALDKW

SEQ ID NO: 18 - protein, 8 aa, HUMAN IMMUNODEFICIENCY VIRUS
ELLELDKW

SEQ ID NO: 19 - protein, 8 aa, HUMAN IMMUNODEFICIENCY VIRUS
DITNWLWY

SEQ ID NO: 20 - protein, 8 aa, HUMAN IMMUNODEFICIENCY VIRUS
WLWYIKIF

SEQ ID NO: 21 - protein, 8 aa, HUMAN IMMUNODEFICIENCY VIRUS
LIGLRIIF

SEQ ID NO: 22 - protein, 8 aa, HUMAN IMMUNODEFICIENCY VIRUS
LIGLRIVF

SEQ ID NO: 23 - protein, 8 aa, HUMAN IMMUNODEFICIENCY VIRUS
SIRLVNGF

SEQ ID NO: 24 - protein, 8 aa, HUMAN IMMUNODEFICIENCY VIRUS
SIRLVSGF

SEQ ID NO: 25 - protein, 8 aa, HUMAN IMMUNODEFICIENCY VIRUS
DLRNLCLF

SEQ ID NO: 26 - protein, 8 aa, HUMAN IMMUNODEFICIENCY VIRUS
DLRSLCLF

SEQ ID NO: 27 - protein, 8 aa, HUMAN IMMUNODEFICIENCY VIRUS
RSLCLFSY

SEQ ID NO: 28 - protein, 8 aa, HUMAN IMMUNODEFICIENCY VIRUS
ELLGRRGW

SEQ ID NO: 29 - protein, 9 aa, HUMAN IMMUNODEFICIENCY VIRUS
TVYYGVPVW

SEQ ID NO: 30 - protein, 9 aa, HUMAN IMMUNODEFICIENCY VIRUS
NVTENFNMW

SEQ ID NO: 31 - protein, 9 aa, HUMAN IMMUNODEFICIENCY VIRUS
DSSNSTGNY

SEQ ID NO: 32 - protein, 9 aa, HUMAN IMMUNODEFICIENCY VIRUS
ILKCNDKKF

SEQ ID NO: 33 - protein, 9 aa, HUMAN IMMUNODEFICIENCY VIRUS
RIGPGQTFY

SEQ ID NO: 34 - protein, 9 aa, HUMAN IMMUNODEFICIENCY VIRUS
GIGPGQTFY

SEQ ID NO: 35 - protein, 9 aa, HUMAN IMMUNODEFICIENCY VIRUS
SIGSGQAFY

SEQ ID NO: 36 - protein, 9 aa, HUMAN IMMUNODEFICIENCY VIRUS
DLEITTHSF

SEQ ID NO: 37 - protein, 9 aa, HUMAN IMMUNODEFICIENCY VIRUS
HSFNCGGEF

SEQ ID NO: 38 - protein, 9 aa, HUMAN IMMUNODEFICIENCY VIRUS
HSFNCRGEF

SEQ ID NO: 39 - protein, 9 aa, HUMAN IMMUNODEFICIENCY VIRUS
RIKQIINMW

SEQ ID NO: 40 - protein, 9 aa, HUMAN IMMUNODEFICIENCY VIRUS
RIKQIVNMW

SEQ ID NO: 41 - protein, 9 aa, HUMAN IMMUNODEFICIENCY VIRUS
GSENGTETF

SEQ ID NO: 42 - protein, 9 aa, HUMAN IMMUNODEFICIENCY VIRUS
GIGAVFLGF

SEQ ID NO: 43 - protein, 9 aa, HUMAN IMMUNODEFICIENCY VIRUS
MLGAMFLGF

SEQ ID NO: 44 - protein, 9 aa, HUMAN IMMUNODEFICIENCY VIRUS
TIGAMFLGF

SEQ ID NO: 45 - protein, 9 aa, HUMAN IMMUNODEFICIENCY VIRUS
LICTTAVPW

SEQ ID NO: 46 - protein, 9 aa, HUMAN IMMUNODEFICIENCY VIRUS
LICTTNVPW

SEQ ID NO: 47 - protein, 9 aa, HUMAN IMMUNODEFICIENCY VIRUS
LICTTTVPW

SEQ ID NO: 48 - protein, 9 aa, HUMAN IMMUNODEFICIENCY VIRUS
ALDKWASLW

SEQ ID NO: 49 - protein, 9 aa, HUMAN IMMUNODEFICIENCY VIRUS
ELDKWASLW

SEQ ID NO: 50 - protein, 9 aa, HUMAN IMMUNODEFICIENCY VIRUS
GLIGLRIIF

SEQ ID NO: 51 - protein, 9 aa, HUMAN IMMUNODEFICIENCY VIRUS
GLIGLRIVF

SEQ ID NO: 52 - protein, 9 aa, HUMAN IMMUNODEFICIENCY VIRUS
IVNRVRQGY

SEQ ID NO: 53 - protein, 9 aa, HUMAN IMMUNODEFICIENCY VIRUS
RSIRLVNGF

SEQ ID NO: 54 - protein, 9 aa, HUMAN IMMUNODEFICIENCY VIRUS
RSIRLVSGF

SEQ ID NO: 55 - protein, 9 aa, HUMAN IMMUNODEFICIENCY VIRUS
VSGFLALAW

SEQ ID NO: 56 - protein, 9 aa, HUMAN IMMUNODEFICIENCY VIRUS
FSYHRLRDF

SEQ ID NO: 57 - protein, 9 aa, HUMAN IMMUNODEFICIENCY VIRUS
SLKGLRLGW

SEQ ID NO: 58 - protein, 9 aa, HUMAN IMMUNODEFICIENCY VIRUS
SLRGLQRGW

SEQ ID NO: 59 - protein, 9 aa, HUMAN IMMUNODEFICIENCY VIRUS
RLGWEGLKY

SEQ ID NO: 60 - protein, 10 aa, HUMAN IMMUNODEFICIENCY VIRUS
VTVYYGVPVW

SEQ ID NO: 61 - protein, 10 aa, HUMAN IMMUNODEFICIENCY VIRUS
QMHEDIISLW

SEQ ID NO: 62 - protein, 10 aa, HUMAN IMMUNODEFICIENCY VIRUS
ITQACPKVSF

SEQ ID NO: 63 - protein, 10 aa, HUMAN IMMUNODEFICIENCY VIRUS
VSFEPIPIHY

SEQ ID NO: 64 - protein, 10 aa, HUMAN IMMUNODEFICIENCY VIRUS
PIHYCAPAGF

SEQ ID NO: 65 - protein, 10 aa, HUMAN IMMUNODEFICIENCY VIRUS
PIHYCTPAGF

SEQ ID NO: 66 - protein, 10 aa, HUMAN IMMUNODEFICIENCY VIRUS
AILKCNDKKF

SEQ ID NO: 67 - protein, 10 aa, HUMAN IMMUNODEFICIENCY VIRUS
NTSPRSRVAY

SEQ ID NO: 68 - protein, 10 aa, HUMAN IMMUNODEFICIENCY VIRUS
HSFNCGGEFF

SEQ ID NO: 69 - protein, 10 aa, HUMAN IMMUNODEFICIENCY VIRUS
HSFNCRGEFF

SEQ ID NO: 70 - protein, 10 aa, HUMAN IMMUNODEFICIENCY VIRUS
NTETNKTETF

SEQ ID NO: 71 - protein, 10 aa, HUMAN IMMUNODEFICIENCY VIRUS
NTTGNTTETF

SEQ ID NO: 72 - protein, 10 aa, HUMAN IMMUNODEFICIENCY VIRUS
KLICTTAVPW

SEQ ID NO: 73 - protein, 10 aa, HUMAN IMMUNODEFICIENCY VIRUS
KLICTTNVPW

SEQ ID NO: 74 - protein, 10 aa, HUMAN IMMUNODEFICIENCY VIRUS
KLICTTTVPW

SEQ ID NO: 75 - protein, 10 aa, HUMAN IMMUNODEFICIENCY VIRUS
TTNVPWNSSW

SEQ ID NO: 76 - protein, 10 aa, HUMAN IMMUNODEFICIENCY VIRUS
SIVNRVRQGY

SEQ ID NO: 77 - protein, 10 aa, HUMAN IMMUNODEFICIENCY VIRUS
LVSGFLALAW

SEQ ID NO: 78 - protein, 10 aa, HUMAN IMMUNODEFICIENCY VIRUS
DLRNLCLFSY

SEQ ID NO: 79 - protein, 10 aa, HUMAN IMMUNODEFICIENCY VIRUS
DLRSLCLFSY

SEQ ID NO: 80 - protein, 10 aa, HUMAN IMMUNODEFICIENCY VIRUS
IVELLGRRGW

SEQ ID NO: 81 - protein, 10 aa, HUMAN IMMUNODEFICIENCY VIRUS
SSLKGLRLGW

SEQ ID NO: 82 - protein, 11 aa, HUMAN IMMUNODEFICIENCY VIRUS
WVTVYYGVPVW

SEQ ID NO: 83 - protein, 11 aa, HUMAN IMMUNODEFICIENCY VIRUS
PVWKEATTTLF

SEQ ID NO: 84 - protein, 11 aa, HUMAN IMMUNODEFICIENCY VIRUS
TLFCASDAKAY

SEQ ID NO: 85 - protein, 11 aa, HUMAN IMMUNODEFICIENCY VIRUS
VITQACPKVSF

SEQ ID NO: 86 - protein, 11 aa, HUMAN IMMUNODEFICIENCY VIRUS
KVSFEPIPIHY

SEQ ID NO: 87 - protein, 11 aa, HUMAN IMMUNODEFICIENCY VIRUS
GTAGNSSRAAY

SEQ ID NO: 88 - protein, 11 aa, HUMAN IMMUNODEFICIENCY VIRUS
TTHSFNCGGEF

SEQ ID NO: 89 - protein, 11 aa, HUMAN IMMUNODEFICIENCY VIRUS
TTHSFNCRGEF

SEQ ID NO: 90 - protein, 11 aa, HUMAN IMMUNODEFICIENCY VIRUS
VMHSFNCGGEF

SEQ ID NO: 91 - protein, 11 aa, HUMAN IMMUNODEFICIENCY VIRUS
HSFNCGGEFFY

SEQ ID NO: 92 - protein, 11 aa, HUMAN IMMUNODEFICIENCY VIRUS
HSFNCRGEFFY

SEQ ID NO: 93 - protein, 11 aa, HUMAN IMMUNODEFICIENCY VIRUS
NMWQEVGKAMY

SEQ ID NO: 94 - protein, 11 aa, HUMAN IMMUNODEFICIENCY VIRUS
DMRDNWRSELY

SEQ ID NO: 95 - protein, 11 aa, HUMAN IMMUNODEFICIENCY VIRUS
AVGIGAVFLGF

SEQ ID NO: 96 - protein, 11 aa, HUMAN IMMUNODEFICIENCY VIRUS
YLKDQQLLGIW

SEQ ID NO: 97 - protein, 11 aa, HUMAN IMMUNODEFICIENCY VIRUS
YLRDQQLLGIW

SEQ ID NO: 98 - protein, 11 aa, HUMAN IMMUNODEFICIENCY VIRUS
CTTNVPWNSSW

SEQ ID NO: 99 - protein, 11 aa, HUMAN IMMUNODEFICIENCY VIRUS
WMEWEREIDNY

SEQ ID NO: 100 - protein, 11 aa, HUMAN IMMUNODEFICIENCY VIRUS
LLALDKWASLW

SEQ ID NO: 101 - protein, 11 aa, HUMAN IMMUNODEFICIENCY VIRUS
LLELDKWASLW

SEQ ID NO: 102 - protein, 11 aa, HUMAN IMMUNODEFICIENCY VIRUS
ALDKWASLWNW

SEQ ID NO: 103 - protein, 11 aa, HUMAN IMMUNODEFICIENCY VIRUS
ELDKWASLWNW

SEQ ID NO: 104 - protein, 11 aa, HUMAN IMMUNODEFICIENCY VIRUS
ISNWLWYIKIF

SEQ ID NO: 105 - protein, 11 aa, HUMAN IMMUNODEFICIENCY VIRUS
ITKWLWYIKIF

SEQ ID NO: 106 - protein, 11 aa, HUMAN IMMUNODEFICIENCY VIRUS
ITNWLWYIKIF

SEQ ID NO: 107 - protein, 11 aa, HUMAN IMMUNODEFICIENCY VIRUS
LSIVNRVRQGY

SEQ ID NO: 108 - protein, 11 aa, HUMAN IMMUNODEFICIENCY VIRUS
RVRQGYSPLSF

SEQ ID NO: 109 - protein, 11 aa, HUMAN IMMUNODEFICIENCY VIRUS
RLVSGFLALAW

SEQ ID NO: 110 - protein, 11 aa, HUMAN IMMUNODEFICIENCY VIRUS
CLFSYHRLRDF

SEQ ID NO: 111 - protein, 11 aa, HUMAN IMMUNODEFICIENCY VIRUS
RIVELLGRRGW

SEQ ID NO: 112 - protein, 11 aa, HUMAN IMMUNODEFICIENCY VIRUS
GLRLGWEGLKY

SEQ ID NO: 113 - protein, 11 aa, HUMAN IMMUNODEFICIENCY VIRUS
RLGWEGLKYLW

SEQ ID NO: 114 - protein, 8 aa, HUMAN IMMUNODEFICIENCY VIRUS
ASRELERF

SEQ ID NO: 115 - protein, 8 aa, HUMAN IMMUNODEFICIENCY VIRUS
SSQVSQNY

SEQ ID NO: 116 - protein, 8 aa, HUMAN IMMUNODEFICIENCY VIRUS
KVIEEKAF

SEQ ID NO: 117 - protein, 8 aa, HUMAN IMMUNODEFICIENCY VIRUS
KVVEEKAF

SEQ ID NO: 118 - protein, 8 aa, HUMAN IMMUNODEFICIENCY VIRUS
TLQEQIAW

SEQ ID NO: 119 - protein, 8 aa, HUMAN IMMUNODEFICIENCY VIRUS
TLQEQIGW

SEQ ID NO: 120 - protein, 8 aa, HUMAN IMMUNODEFICIENCY VIRUS
PIPVGDIY

SEQ ID NO: 121 - protein, 8 aa, HUMAN IMMUNODEFICIENCY VIRUS
PIPVGEIY

SEQ ID NO: 122 - protein, 8 aa, HUMAN IMMUNODEFICIENCY VIRUS
ASQEVKNW

SEQ ID NO: 123 - protein, 8 aa, HUMAN IMMUNODEFICIENCY VIRUS
ATQDVKNW

SEQ ID NO: 124 - protein, 8 aa, HUMAN IMMUNODEFICIENCY VIRUS
ATQEVKNW

SEQ ID NO: 125 - protein, 8 aa, HUMAN IMMUNODEFICIENCY VIRUS
IMMQKSNF

SEQ ID NO: 126 - protein, 8 aa, HUMAN IMMUNODEFICIENCY VIRUS
IMMQRGNF

SEQ ID NO: 127 - protein, 8 aa, HUMAN IMMUNODEFICIENCY VIRUS
CTERQANF

SEQ ID NO: 128 - protein, 8 aa, HUMAN IMMUNODEFICIENCY VIRUS
ETIDKDLY

SEQ ID NO: 129 - protein, 8 aa, HUMAN IMMUNODEFICIENCY VIRUS
LTSLKSLF

SEQ ID NO: 130 - protein, 8 aa, HUMAN IMMUNODEFICIENCY VIRUS
LTSLRSLF

SEQ ID NO: 131 - protein, 9 aa, HUMAN IMMUNODEFICIENCY VIRUS
LSGGKLDAW

SEQ ID NO: 132 - protein, 9 aa, HUMAN IMMUNODEFICIENCY VIRUS
GSEELRSLY

SEQ ID NO: 133 - protein, 9 aa, HUMAN IMMUNODEFICIENCY VIRUS
NSSQVSQNY

SEQ ID NO: 134 - protein, 9 aa, HUMAN IMMUNODEFICIENCY VIRUS
ISPRTLNAW

SEQ ID NO: 135 - protein, 9 aa, HUMAN IMMUNODEFICIENCY VIRUS
LSPRTLNAW

SEQ ID NO: 136 - protein, 9 aa, HUMAN IMMUNODEFICIENCY VIRUS
FSPEVIPMF

SEQ ID NO: 137 - protein, 9 aa, HUMAN IMMUNODEFICIENCY VIRUS
TINEEAAEW

SEQ ID NO: 138 - protein, 9 aa, HUMAN IMMUNODEFICIENCY VIRUS
STLQEQIAW

SEQ ID NO: 139 - protein, 9 aa, HUMAN IMMUNODEFICIENCY VIRUS
STLQEQIGW

SEQ ID NO: 140 - protein, 9 aa, HUMAN IMMUNODEFICIENCY VIRUS
PVGDIYKRW

SEQ ID NO: 141 - protein, 9 aa, HUMAN IMMUNODEFICIENCY VIRUS
PVGEIYKRW

SEQ ID NO: 142 - protein, 9 aa, HUMAN IMMUNODEFICIENCY VIRUS
GLNKIVRMY

SEQ ID NO: 143 - protein, 9 aa, HUMAN IMMUNODEFICIENCY VIRUS
NIMMQRGNF

SEQ ID NO: 144 - protein, 9 aa, HUMAN IMMUNODEFICIENCY VIRUS
TIMMQRGNF

SEQ ID NO: 145 - protein, 9 aa, HUMAN IMMUNODEFICIENCY VIRUS
SSKGRPGNF

SEQ ID NO: 146 - protein, 9 aa, HUMAN IMMUNODEFICIENCY VIRUS
PTAPPAESF

SEQ ID NO: 147 - protein, 9 aa, HUMAN IMMUNODEFICIENCY VIRUS
PTAPPEESF

SEQ ID NO: 148 - protein, 9 aa, HUMAN IMMUNODEFICIENCY VIRUS
PTAPPAESF

SEQ ID NO: 149 - protein, 9 aa, HUMAN IMMUNODEFICIENCY VIRUS
PTAPPPESF

SEQ ID NO: 150 - protein, 9 aa, HUMAN IMMUNODEFICIENCY VIRUS
PLASLKSLF

SEQ ID NO: 151 - protein, 9 aa, HUMAN IMMUNODEFICIENCY VIRUS
PLTSLKSLF

SEQ ID NO: 152 - protein, 9 aa, HUMAN IMMUNODEFICIENCY VIRUS
PLTSLRSLF

SEQ ID NO: 153 - protein, 10 aa, HUMAN IMMUNODEFICIENCY VIRUS
VLSGGKLDAW

SEQ ID NO: 154 - protein, 10 aa, HUMAN IMMUNODEFICIENCY VIRUS
RLRPGGKKKY

SEQ ID NO: 155 - protein, 10 aa, HUMAN IMMUNODEFICIENCY VIRUS
SLFNTVATLY

SEQ ID NO: 156 - protein, 10 aa, HUMAN IMMUNODEFICIENCY VIRUS
SLYNTVATLY

SEQ ID NO: 157 - protein, 10 aa, HUMAN IMMUNODEFICIENCY VIRUS
AISPRTLNAW

SEQ ID NO: 158 - protein, 10 aa, HUMAN IMMUNODEFICIENCY VIRUS
ALSPRTLNAW

SEQ ID NO: 159 - protein, 10 aa, HUMAN IMMUNODEFICIENCY VIRUS
WVKVIEEKAF

SEQ ID NO: 160 - protein, 10 aa, HUMAN IMMUNODEFICIENCY VIRUS
WVKVVEEKAF

SEQ ID NO: 161 - protein, 10 aa, HUMAN IMMUNODEFICIENCY VIRUS
DTINEEAAEW

SEQ ID NO: 162 - protein, 10 aa, HUMAN IMMUNODEFICIENCY VIRUS
ETINEEAAEW

SEQ ID NO: 163 - protein, 10 aa, HUMAN IMMUNODEFICIENCY VIRUS
TSTLQEQIAW

SEQ ID NO: 164 - protein, 10 aa, HUMAN IMMUNODEFICIENCY VIRUS
TSTLQEQIGW

SEQ ID NO: 165 - protein, 10 aa, HUMAN IMMUNODEFICIENCY VIRUS
DIKQGPKEPF

SEQ ID NO: 166 - protein, 10 aa, HUMAN IMMUNODEFICIENCY VIRUS
DIRQGPKEPF

SEQ ID NO: 167 - protein, 10 aa, HUMAN IMMUNODEFICIENCY VIRUS
ATIMMQRGNF

SEQ ID NO: 168 - protein, 10 aa, HUMAN IMMUNODEFICIENCY VIRUS
PSHKGRPGNF

SEQ ID NO: 169 - protein, 10 aa, HUMAN IMMUNODEFICIENCY VIRUS
PSNKGRPGNF

SEQ ID NO: 170 - protein, 10 aa, HUMAN IMMUNODEFICIENCY VIRUS
PSSKGRPGNF

SEQ ID NO: 171 - protein, 11 aa, HUMAN IMMUNODEFICIENCY VIRUS
SVLSGGKLDAW

SEQ ID NO: 172 - protein, 11 aa, HUMAN IMMUNODEFICIENCY VIRUS
IVWASRELERF

SEQ ID NO: 173 - protein, 11 aa, HUMAN IMMUNODEFICIENCY VIRUS
LVWASRELERF

SEQ ID NO: 174 - protein, 11 aa, HUMAN IMMUNODEFICIENCY VIRUS
RSLYNTVATLY

SEQ ID NO: 175 - protein, 11 aa, HUMAN IMMUNODEFICIENCY VIRUS
TTSTLQEQIAW

SEQ ID NO: 176 - protein, 11 aa, HUMAN IMMUNODEFICIENCY VIRUS
TTSTLQEQIGW

SEQ ID NO: 177 - protein, 11 aa, HUMAN IMMUNODEFICIENCY VIRUS
PIPVGEIYKRW

SEQ ID NO: 178 - protein, 11 aa, HUMAN IMMUNODEFICIENCY VIRUS
ILGLNKIVRMY

SEQ ID NO: 179 - protein, 11 aa, HUMAN IMMUNODEFICIENCY VIRUS
ASAQQDLKGGY

SEQ ID NO: 180 - protein, 11 aa, HUMAN IMMUNODEFICIENCY VIRUS
ATAQQDLKGGY

SEQ ID NO: 181 - protein, 11 aa, HUMAN IMMUNODEFICIENCY VIRUS
PTAPPAESFGF

SEQ ID NO: 182 - protein, 11 aa, HUMAN IMMUNODEFICIENCY VIRUS
PTAPPEESFRF

SEQ ID NO: 183 - protein, 11 aa, HUMAN IMMUNODEFICIENCY VIRUS
PTAPPAESFRF

SEQ ID NO: 184 - protein, 11 aa, HUMAN IMMUNODEFICIENCY VIRUS
PTAPPPESFRF

SEQ ID NO: 185 - protein, 8 aa, HUMAN IMMUNODEFICIENCY VIRUS
ATNADCAW

SEQ ID NO: 186 - protein, 8 aa, HUMAN IMMUNODEFICIENCY VIRUS
PMTYKGAF

SEQ ID NO: 187 - protein, 8 aa, HUMAN IMMUNODEFICIENCY VIRUS
DILDLWVY

SEQ ID NO: 188 - protein, 8 aa, HUMAN IMMUNODEFICIENCY VIRUS
EILDLWVY

SEQ ID NO: 189 - protein, 8 aa, HUMAN IMMUNODEFICIENCY VIRUS
WVYHTQGF

SEQ ID NO: 190 - protein, 8 aa, HUMAN IMMUNODEFICIENCY VIRUS
WVYHTQGY

SEQ ID NO: 191 - protein, 8 aa, HUMAN IMMUNODEFICIENCY VIRUS
GIRYPLTF

SEQ ID NO: 192 - protein, 8 aa, HUMAN IMMUNODEFICIENCY VIRUS
GTRFPLTF

SEQ ID NO: 193 - protein, 8 aa, HUMAN IMMUNODEFICIENCY VIRUS
PLTFGWCF

SEQ ID NO: 194 - protein, 9 aa, HUMAN IMMUNODEFICIENCY VIRUS
WSKSSIVGW

SEQ ID NO: 195 - protein, 9 aa, HUMAN IMMUNODEFICIENCY VIRUS
QVPLRPMTF

SEQ ID NO: 196 - protein, 9 aa, HUMAN IMMUNODEFICIENCY VIRUS
QVPLRPMTY

SEQ ID NO: 197 - protein, 9 aa, HUMAN IMMUNODEFICIENCY VIRUS
WVYHTQGFF

SEQ ID NO: 198 - protein, 9 aa, HUMAN IMMUNODEFICIENCY VIRUS
WVYHTQGYF

SEQ ID NO: 199 - protein, 9 aa, HUMAN IMMUNODEFICIENCY VIRUS
HTQGFFPDW

SEQ ID NO: 200 - protein, 9 aa, HUMAN IMMUNODEFICIENCY VIRUS
HTQGYFPDW

SEQ ID NO: 201 - protein, 9 aa, HUMAN IMMUNODEFICIENCY VIRUS
NTQGYFPDW

SEQ ID NO: 202 - protein, 9 aa, HUMAN IMMUNODEFICIENCY VIRUS
YTPGPGIRY

SEQ ID NO: 203 - protein, 9 aa, HUMAN IMMUNODEFICIENCY VIRUS
YTPGPGTRF

SEQ ID NO: 204 - protein, 10 aa, HUMAN IMMUNODEFICIENCY VIRUS
DLWVYHTQGF

SEQ ID NO: 205 - protein, 10 aa, HUMAN IMMUNODEFICIENCY VIRUS
DLWVYHTQGY

SEQ ID NO: 206 - protein, 10 aa, HUMAN IMMUNODEFICIENCY VIRUS
GIRYPLTFGW

SEQ ID NO: 207 - protein, 10 aa, HUMAN IMMUNODEFICIENCY VIRUS
GTRFPLTFGW

SEQ ID NO: 208 - protein, 10 aa, HUMAN IMMUNODEFICIENCY VIRUS
HMARELHPEY

SEQ ID NO: 209 - protein, 11 aa, HUMAN IMMUNODEFICIENCY VIRUS
NTAATNADCAW

SEQ ID NO: 210 - protein, 11 aa, HUMAN IMMUNODEFICIENCY VIRUS
PLRPMTYKGAF

SEQ ID NO: 211 - protein, 11 aa, HUMAN IMMUNODEFICIENCY VIRUS
DLWVYHTQGFF

SEQ ID NO: 212 - protein, 11 aa, HUMAN IMMUNODEFICIENCY VIRUS
DLWVYHTQGYF

SEQ ID NO: 213 - protein, 11 aa, HUMAN IMMUNODEFICIENCY VIRUS
HMARELHPEYY

SEQ ID NO: 214 - protein, 8 aa, HUMAN IMMUNODEFICIENCY VIRUS
DINLPGKW

SEQ ID NO: 215 - protein, 8 aa, HUMAN IMMUNODEFICIENCY VIRUS
EINLPGKW

SEQ ID NO: 216 - protein, 8 aa, HUMAN IMMUNODEFICIENCY VIRUS
MIGGIGGF

SEQ ID NO: 217 - protein, 8 aa, HUMAN IMMUNODEFICIENCY VIRUS
QIGCTLNF

SEQ ID NO: 218 - protein, 8 aa, HUMAN IMMUNODEFICIENCY VIRUS
QLGCTLNF

SEQ ID NO: 219 - protein, 8 aa, HUMAN IMMUNODEFICIENCY VIRUS
KIGPENPY

SEQ ID NO: 220 - protein, 8 aa, HUMAN IMMUNODEFICIENCY VIRUS
RIGPENPY

SEQ ID NO: 221 - protein, 8 aa, HUMAN IMMUNODEFICIENCY VIRUS
VLDVGDAY

SEQ ID NO: 222 - protein, 8 aa, HUMAN IMMUNODEFICIENCY VIRUS
SVPLDKDF

SEQ ID NO: 223 - protein, 8 aa, HUMAN IMMUNODEFICIENCY VIRUS
MTKILEPF

SEQ ID NO: 224 - protein, 8 aa, HUMAN IMMUNODEFICIENCY VIRUS
QLPEKDSW

SEQ ID NO: 225 - protein, 8 aa, HUMAN IMMUNODEFICIENCY VIRUS
VLPEKDSW

SEQ ID NO: 226 - protein, 8 aa, HUMAN IMMUNODEFICIENCY VIRUS
KLVGKLNW

SEQ ID NO: 227 - protein, 8 aa, HUMAN IMMUNODEFICIENCY VIRUS
ATESIVIW

SEQ ID NO: 228 - protein, 8 aa, HUMAN IMMUNODEFICIENCY VIRUS
ETWWTDYW

SEQ ID NO: 229 - protein, 8 aa, HUMAN IMMUNODEFICIENCY VIRUS
PIVGAETF

SEQ ID NO: 230 - protein, 8 aa, HUMAN IMMUNODEFICIENCY VIRUS
IVGAETFY

SEQ ID NO: 231 - protein, 8 aa, HUMAN IMMUNODEFICIENCY VIRUS
KTELQAIY

SEQ ID NO: 232 - protein, 8 aa, HUMAN IMMUNODEFICIENCY VIRUS
NIVTDSQY

SEQ ID NO: 233 - protein, 8 aa, HUMAN IMMUNODEFICIENCY VIRUS
LIKKEKVY

SEQ ID NO: 234 - protein, 8 aa, HUMAN IMMUNODEFICIENCY VIRUS
AVHVASGY

SEQ ID NO: 235 - protein, 8 aa, HUMAN IMMUNODEFICIENCY VIRUS
ETGQETAY

SEQ ID NO: 236 - protein, 8 aa, HUMAN IMMUNODEFICIENCY VIRUS
ILKLAGRW

SEQ ID NO: 237 - protein, 8 aa, HUMAN IMMUNODEFICIENCY VIRUS
LLKLAGRW

SEQ ID NO: 238 - protein, 8 aa, HUMAN IMMUNODEFICIENCY VIRUS
HTDNGSNF

SEQ ID NO: 239 - protein, 8 aa, HUMAN IMMUNODEFICIENCY VIRUS
TTVKAACW

SEQ ID NO: 240 - protein, 8 aa, HUMAN IMMUNODEFICIENCY VIRUS
AVKAACWW

SEQ ID NO: 241 - protein, 8 aa, HUMAN IMMUNODEFICIENCY VIRUS
TVKAACWW

SEQ ID NO: 242 - protein, 8 aa, HUMAN IMMUNODEFICIENCY VIRUS
QIIKIQNF

SEQ ID NO: 243 - protein, 8 aa, HUMAN IMMUNODEFICIENCY VIRUS
QITKIQNF

SEQ ID NO: 244 - protein, 8 aa, HUMAN IMMUNODEFICIENCY VIRUS
KIQNFRVY

SEQ ID NO: 245 - protein, 9 aa, HUMAN IMMUNODEFICIENCY VIRUS
PTRRELQVW

SEQ ID NO: 246 - protein, 9 aa, HUMAN IMMUNODEFICIENCY VIRUS
FSFPQITLW

SEQ ID NO: 247 - protein, 9 aa, HUMAN IMMUNODEFICIENCY VIRUS
KMIGGIGGF

SEQ ID NO: 248 - protein, 9 aa, HUMAN IMMUNODEFICIENCY VIRUS
ELNKRTQDF

SEQ ID NO: 249 - protein, 9 aa, HUMAN IMMUNODEFICIENCY VIRUS
TVLDVGDAY

SEQ ID NO: 250 - protein, 9 aa, HUMAN IMMUNODEFICIENCY VIRUS
VLDVGDAYF

SEQ ID NO: 251 - protein, 9 aa, HUMAN IMMUNODEFICIENCY VIRUS
FSVPLDKDF

SEQ ID NO: 252 - protein, 9 aa, HUMAN IMMUNODEFICIENCY VIRUS
PLDKDFRKY

SEQ ID NO: 253 - protein, 9 aa, HUMAN IMMUNODEFICIENCY VIRUS
ETPGIRYQY

SEQ ID NO: 254 - protein, 9 aa, HUMAN IMMUNODEFICIENCY VIRUS
SMTKILEPF

SEQ ID NO: 255 - protein, 9 aa, HUMAN IMMUNODEFICIENCY VIRUS
ELREHLLKW

SEQ ID NO: 256 - protein, 9 aa, HUMAN IMMUNODEFICIENCY VIRUS
ELRQHLLRW

SEQ ID NO: 257 - protein, 9 aa, HUMAN IMMUNODEFICIENCY VIRUS
IVLPEKDSW

SEQ ID NO: 258 - protein, 9 aa, HUMAN IMMUNODEFICIENCY VIRUS
KLNWASQIY

SEQ ID NO: 259 - protein, 9 aa, HUMAN IMMUNODEFICIENCY VIRUS
VIWGKTPKF

SEQ ID NO: 260 - protein, 9 aa, HUMAN IMMUNODEFICIENCY VIRUS
KLPIQKETW

SEQ ID NO: 261 - protein, 9 aa, HUMAN IMMUNODEFICIENCY VIRUS
RLPIQKETW

SEQ ID NO: 262 - protein, 9 aa, HUMAN IMMUNODEFICIENCY VIRUS
WTDYWQATW

SEQ ID NO: 263 - protein, 9 aa, HUMAN IMMUNODEFICIENCY VIRUS
WTEYWQATW

SEQ ID NO: 264 - protein, 9 aa, HUMAN IMMUNODEFICIENCY VIRUS
ATWIPEWEF

SEQ ID NO: 265 - protein, 9 aa, HUMAN IMMUNODEFICIENCY VIRUS
NTPPLVKLW

SEQ ID NO: 266 - protein, 9 aa, HUMAN IMMUNODEFICIENCY VIRUS
PIVGAETFY

SEQ ID NO: 267 - protein, 9 aa, HUMAN IMMUNODEFICIENCY VIRUS
ETKLGKAGY

SEQ ID NO: 268 - protein, 9 aa, HUMAN IMMUNODEFICIENCY VIRUS
QLIKKEKVY

SEQ ID NO: 269 - protein, 9 aa, HUMAN IMMUNODEFICIENCY VIRUS
SSGIRKVLF

SEQ ID NO: 270 - protein, 9 aa, HUMAN IMMUNODEFICIENCY VIRUS
QVDCSPGIW

SEQ ID NO: 271 - protein, 9 aa, HUMAN IMMUNODEFICIENCY VIRUS
ETGQETAYF

SEQ ID NO: 272 - protein, 9 aa, HUMAN IMMUNODEFICIENCY VIRUS
FILKLAGRW

SEQ ID NO: 273 - protein, 9 aa, HUMAN IMMUNODEFICIENCY VIRUS
FLLKLAGRW

SEQ ID NO: 274 - protein, 9 aa, HUMAN IMMUNODEFICIENCY VIRUS
STTVKAACW

SEQ ID NO: 275 - protein, 9 aa, HUMAN IMMUNODEFICIENCY VIRUS
TTVKAACWW

SEQ ID NO: 276 - protein, 9 aa, HUMAN IMMUNODEFICIENCY VIRUS
KTAVQMAVF

SEQ ID NO: 277 - protein, 9 aa, HUMAN IMMUNODEFICIENCY VIRUS
QMAVFIHNF

SEQ ID NO: 278 - protein, 9 aa, HUMAN IMMUNODEFICIENCY VIRUS
KIQNFRVYY

SEQ ID NO: 279 - protein, 10 aa, HUMAN IMMUNODEFICIENCY VIRUS
LTQIGCTLNF

SEQ ID NO: 280 - protein, 10 aa, HUMAN IMMUNODEFICIENCY VIRUS
LTQLGCTLNF

SEQ ID NO: 281 - protein, 10 aa, HUMAN IMMUNODEFICIENCY VIRUS
GMDGPKVKQW

SEQ ID NO: 282 - protein, 10 aa, HUMAN IMMUNODEFICIENCY VIRUS
ISKIGPENPY

SEQ ID NO: 283 - protein, 10 aa, HUMAN IMMUNODEFICIENCY VIRUS
ISRIGPENPY

SEQ ID NO: 284 - protein, 10 aa, HUMAN IMMUNODEFICIENCY VIRUS
AIKKKDSTKW

SEQ ID NO: 285 - protein, 10 aa, HUMAN IMMUNODEFICIENCY VIRUS
STKWRKLVDF

SEQ ID NO: 286 - protein, 10 aa, HUMAN IMMUNODEFICIENCY VIRUS
ELNKRTQDFW

SEQ ID NO: 287 - protein, 10 aa, HUMAN IMMUNODEFICIENCY VIRUS
VTVLDVGDAY

SEQ ID NO: 288 - protein, 10 aa, HUMAN IMMUNODEFICIENCY VIRUS
TVLDVGDAYF

SEQ ID NO: 289 - protein, 10 aa, HUMAN IMMUNODEFICIENCY VIRUS
SSMTKILEPF

SEQ ID NO: 290 - protein, 10 aa, HUMAN IMMUNODEFICIENCY VIRUS
VIYQYMDDLY

SEQ ID NO: 291 - protein, 10 aa, HUMAN IMMUNODEFICIENCY VIRUS
PIQLPEKDSW

SEQ ID NO: 292 - protein, 10 aa, HUMAN IMMUNODEFICIENCY VIRUS
PIVLPEKDSW

SEQ ID NO: 293 - protein, 10 aa, HUMAN IMMUNODEFICIENCY VIRUS
ILKEPVHGVY

SEQ ID NO: 294 - protein, 10 aa, HUMAN IMMUNODEFICIENCY VIRUS
EIQKQGQDQW

SEQ ID NO: 295 - protein, 10 aa, HUMAN IMMUNODEFICIENCY VIRUS
EIQKQGQGQW

SEQ ID NO: 296 - protein, 10 aa, HUMAN IMMUNODEFICIENCY VIRUS
WTYQIYQEPF

SEQ ID NO: 297 - protein, 10 aa, HUMAN IMMUNODEFICIENCY VIRUS
KIATESIVIW

SEQ ID NO: 298 - protein, 10 aa, HUMAN IMMUNODEFICIENCY VIRUS
IVIWGKTPKF

SEQ ID NO: 299 - protein, 10 aa, HUMAN IMMUNODEFICIENCY VIRUS
PIQKETWEAW

SEQ ID NO: 300 - protein, 10 aa, HUMAN IMMUNODEFICIENCY VIRUS
PIQKETWETW

SEQ ID NO: 301 - protein, 10 aa, HUMAN IMMUNODEFICIENCY VIRUS
ETWETWWTDY

SEQ ID NO: 302 - protein, 10 aa, HUMAN IMMUNODEFICIENCY VIRUS
ETWETWWTEY

SEQ ID NO: 303 - protein, 10 aa, HUMAN IMMUNODEFICIENCY VIRUS
NTPPLVKLWY

SEQ ID NO: 304 - protein, 10 aa, HUMAN IMMUNODEFICIENCY VIRUS
EVNIVTDSQY

SEQ ID NO: 305 - protein, 10 aa, HUMAN IMMUNODEFICIENCY VIRUS
VSAGIRKVLF

SEQ ID NO: 306 - protein, 10 aa, HUMAN IMMUNODEFICIENCY VIRUS
VSSGIRKVLF

SEQ ID NO: 307 - protein, 10 aa, HUMAN IMMUNODEFICIENCY VIRUS
LVAVHVASGY

SEQ ID NO: 308 - protein, 10 aa, HUMAN IMMUNODEFICIENCY VIRUS
TIHTDNGSNF

SEQ ID NO: 309 - protein, 10 aa, HUMAN IMMUNODEFICIENCY VIRUS
VIHTDNGSNF

SEQ ID NO: 310 - protein, 10 aa, HUMAN IMMUNODEFICIENCY VIRUS
TSAAVKAACW

SEQ ID NO: 311 - protein, 10 aa, HUMAN IMMUNODEFICIENCY VIRUS
TSTTVKAACW

SEQ ID NO: 312 - protein, 10 aa, HUMAN IMMUNODEFICIENCY VIRUS
STTVKAACWW

SEQ ID NO: 313 - protein, 10 aa, HUMAN IMMUNODEFICIENCY VIRUS
GIKQEFGIPY

SEQ ID NO: 314 - protein, 10 aa, HUMAN IMMUNODEFICIENCY VIRUS
GIQQEFGIPY

SEQ ID NO: 315 - protein, 10 aa, HUMAN IMMUNODEFICIENCY VIRUS
IIKIQNFRVY

SEQ ID NO: 316 - protein, 10 aa, HUMAN IMMUNODEFICIENCY VIRUS
ITKIQNFRVY

SEQ ID NO: 317 - protein, 11 aa, HUMAN IMMUNODEFICIENCY VIRUS
NSPTRRELQVW

SEQ ID NO: 318 - protein, 11 aa, HUMAN IMMUNODEFICIENCY VIRUS
VSFSFPQITLW

SEQ ID NO: 319 - protein, 11 aa, HUMAN IMMUNODEFICIENCY VIRUS
GTTLNFPQITF

SEQ ID NO: 320 - protein, 11 aa, HUMAN IMMUNODEFICIENCY VIRUS
PSLSFPQITLW

SEQ ID NO: 321 - protein, 11 aa, HUMAN IMMUNODEFICIENCY VIRUS
GTLNCPQITLW

SEQ ID NO: 322 - protein, 11 aa, HUMAN IMMUNODEFICIENCY VIRUS
PTFNFPQITLW

SEQ ID NO: 323 - protein, 11 aa, HUMAN IMMUNODEFICIENCY VIRUS
SSFSFPQITLW

SEQ ID NO: 324 - protein, 11 aa, HUMAN IMMUNODEFICIENCY VIRUS
VLEDINLPGKW

SEQ ID NO: 325 - protein, 11 aa, HUMAN IMMUNODEFICIENCY VIRUS
VLEEINLPGKW

SEQ ID NO: 326 - protein, 11 aa, HUMAN IMMUNODEFICIENCY VIRUS
GIGGFIKVRQY

SEQ ID NO: 327 - protein, 11 aa, HUMAN IMMUNODEFICIENCY VIRUS
LLTQIGCTLNF

SEQ ID NO: 328 - protein, 11 aa, HUMAN IMMUNODEFICIENCY VIRUS
MLTQIGCTLNF

SEQ ID NO: 329 - protein, 11 aa, HUMAN IMMUNODEFICIENCY VIRUS
MLTQLGCTLNF

SEQ ID NO: 330 - protein, 11 aa, HUMAN IMMUNODEFICIENCY VIRUS
KISKIGPENPY

SEQ ID NO: 331 - protein, 11 aa, HUMAN IMMUNODEFICIENCY VIRUS
KISRIGPENPY

SEQ ID NO: 332 - protein, 11 aa, HUMAN IMMUNODEFICIENCY VIRUS
DSTKWRKLVDF

SEQ ID NO: 333 - protein, 11 aa, HUMAN IMMUNODEFICIENCY VIRUS
SVTVLDVGDAY

SEQ ID NO: 334 - protein, 11 aa, HUMAN IMMUNODEFICIENCY VIRUS
VTVLDVGDAYF

SEQ ID NO: 335 - protein, 11 aa, HUMAN IMMUNODEFICIENCY VIRUS
SVPLDKDFRKY

SEQ ID NO: 336 - protein, 11 aa, HUMAN IMMUNODEFICIENCY VIRUS
SINNETPGIRY

SEQ ID NO: 337 - protein, 11 aa, HUMAN IMMUNODEFICIENCY VIRUS
STNNETPGIRY

SEQ ID NO: 338 - protein, 11 aa, HUMAN IMMUNODEFICIENCY VIRUS
QSSMTKILEPF

SEQ ID NO: 339 - protein, 11 aa, HUMAN IMMUNODEFICIENCY VIRUS
IVIYQYMDDLY

SEQ ID NO: 340 - protein, 11 aa, HUMAN IMMUNODEFICIENCY VIRUS
ELREHLLKWGF

SEQ ID NO: 341 - protein, 11 aa, HUMAN IMMUNODEFICIENCY VIRUS
ELRQHLLRWGF

SEQ ID NO: 342 - protein, 11 aa, HUMAN IMMUNODEFICIENCY VIRUS
WMGYELHPDKW

SEQ ID NO: 343 - protein, 11 aa, HUMAN IMMUNODEFICIENCY VIRUS
DIQKLVGKLNW

SEQ ID NO: 344 - protein, 11 aa, HUMAN IMMUNODEFICIENCY VIRUS
EILKEPVHGVY

SEQ ID NO: 345 - protein, 11 aa, HUMAN IMMUNODEFICIENCY VIRUS
ILKEPVHGVYY

SEQ ID NO: 346 - protein, 11 aa, HUMAN IMMUNODEFICIENCY VIRUS
SIVIWGKTPKF

SEQ ID NO: 347 - protein, 11 aa, HUMAN IMMUNODEFICIENCY VIRUS
PIQKETWEAWW

SEQ ID NO: 348 - protein, 11 aa, HUMAN IMMUNODEFICIENCY VIRUS
PIQKETWETWW

SEQ ID NO: 349 - protein, 11 aa, HUMAN IMMUNODEFICIENCY VIRUS
ETWETWWTDYW

SEQ ID NO: 350 - protein, 11 aa, HUMAN IMMUNODEFICIENCY VIRUS
FVNTPPLVKLW

SEQ ID NO: 351 - protein, 11 aa, HUMAN IMMUNODEFICIENCY VIRUS
LIKKEKVYLAW

SEQ ID NO: 352 - protein, 11 aa, HUMAN IMMUNODEFICIENCY VIRUS
LIKKEKVYLSW

SEQ ID NO: 353 - protein, 11 aa, HUMAN IMMUNODEFICIENCY VIRUS
LVSAGIRKVLF

SEQ ID NO: 354 - protein, 11 aa, HUMAN IMMUNODEFICIENCY VIRUS
LVSSGIRKVLF

SEQ ID NO: 355 - protein, 11 aa, HUMAN IMMUNODEFICIENCY VIRUS
HSNWRAMASDF

SEQ ID NO: 356 - protein, 11 aa, HUMAN IMMUNODEFICIENCY VIRUS
ILVAVHVASGY

SEQ ID NO: 357 - protein, 11 aa, HUMAN IMMUNODEFICIENCY VIRUS
KVIHTDNGSNF

SEQ ID NO: 358 - protein, 11 aa, HUMAN IMMUNODEFICIENCY VIRUS
FTSAAVKAACW

SEQ ID NO: 359 - protein, 11 aa, HUMAN IMMUNODEFICIENCY VIRUS
FTSTTVKAACW

SEQ ID NO: 360 - protein, 11 aa, HUMAN IMMUNODEFICIENCY VIRUS
TSAAVKAACWW

SEQ ID NO: 361 - protein, 11 aa, HUMAN IMMUNODEFICIENCY VIRUS
TSTTVKAACWW

SEQ ID NO: 362 - protein, 11 aa, HUMAN IMMUNODEFICIENCY VIRUS
HLKTAVQMAVF

SEQ ID NO: 363 - protein, 11 aa, HUMAN IMMUNODEFICIENCY VIRUS
AVQMAVFIHNF

SEQ ID NO: 364 - protein, 11 aa, HUMAN IMMUNODEFICIENCY VIRUS
QIIKIQNFRVY

SEQ ID NO: 365 - protein, 11 aa, HUMAN IMMUNODEFICIENCY VIRUS
QITKIQNFRVY

SEQ ID NO: 366 - protein, 11 aa, HUMAN IMMUNODEFICIENCY VIRUS
IIKIQNFRVYY

SEQ ID NO: 367 - protein, 11 aa, HUMAN IMMUNODEFICIENCY VIRUS
ITKIQNFRVYY

SEQ ID NO: 368 - protein, 11 aa, HUMAN IMMUNODEFICIENCY VIRUS
PIWKGPAKLLW

SEQ ID NO: 369 - protein, 11 aa, HUMAN IMMUNODEFICIENCY VIRUS
PLWKGPAKLLW

SEQ ID NO: 370 - protein, 8 aa, HUMAN IMMUNODEFICIENCY VIRUS
ILYQSNPY

SEQ ID NO: 371 - protein, 9 aa, HUMAN IMMUNODEFICIENCY VIRUS
AVRIIKILY

SEQ ID NO: 372 - protein, 9 aa, HUMAN IMMUNODEFICIENCY VIRUS
KILYQSNPY

SEQ ID NO: 373 - protein, 11 aa, HUMAN IMMUNODEFICIENCY VIRUS
IIKILYQSNPY

SEQ ID NO: 374 - protein, 9 aa, HUMAN IMMUNODEFICIENCY VIRUS
PVDPNLEPW

SEQ ID NO: 375 - protein, 9 aa, HUMAN IMMUNODEFICIENCY VIRUS
PVDPRLEPW

SEQ ID NO: 376 - protein, 10 aa, HUMAN IMMUNODEFICIENCY VIRUS
FLNKGLGISY

SEQ ID NO: 377 - protein, 8 aa, HUMAN IMMUNODEFICIENCY VIRUS
SLVKHHMY

SEQ ID NO: 378 - protein, 8 aa, HUMAN IMMUNODEFICIENCY VIRUS
RLVITTYW

SEQ ID NO: 379 - protein, 8 aa, HUMAN IMMUNODEFICIENCY VIRUS
QLIHLYYF

SEQ ID NO: 380 - protein, 8 aa, HUMAN IMMUNODEFICIENCY VIRUS
QLIHMHYF

SEQ ID NO: 381 - protein, 8 aa, HUMAN IMMUNODEFICIENCY VIRUS
HLYYFDCF

SEQ ID NO: 382 - protein, 8 aa, HUMAN IMMUNODEFICIENCY VIRUS
HMHYFDCF

SEQ ID NO: 383 - protein, 8 aa, HUMAN IMMUNODEFICIENCY VIRUS
IVSPRCEY

SEQ ID NO: 384 - protein, 9 aa, HUMAN IMMUNODEFICIENCY VIRUS
KSLVKHHMY

SEQ ID NO: 385 - protein, 9 aa, HUMAN IMMUNODEFICIENCY VIRUS
NSLVKHHMY

SEQ ID NO: 386 - protein, 9 aa, HUMAN IMMUNODEFICIENCY VIRUS
GLHTGERDW

SEQ ID NO: 387 - protein, 9 aa, HUMAN IMMUNODEFICIENCY VIRUS
GLQTGERDW

SEQ ID NO: 388 - protein, 9 aa, HUMAN IMMUNODEFICIENCY VIRUS
SIEWRLRRY

SEQ ID NO: 389 - protein, 10 aa, HUMAN IMMUNODEFICIENCY VIRUS
QVDRMKIRTW

SEQ ID NO: 390 - protein, 10 aa, HUMAN IMMUNODEFICIENCY VIRUS
QVDRMRINTW

SEQ ID NO: 391 - protein, 10 aa, HUMAN IMMUNODEFICIENCY VIRUS
QVDRMRIRTW

SEQ ID NO: 392 - protein, 10 aa, HUMAN IMMUNODEFICIENCY VIRUS
HLGHGVSIEW

SEQ ID NO: 393 - protein, 10 aa, HUMAN IMMUNODEFICIENCY VIRUS
HLGQGVSIEW

SEQ ID NO: 394 - protein, 10 aa, HUMAN IMMUNODEFICIENCY VIRUS
VSIEWRLRRY

SEQ ID NO: 395 - protein, 10 aa, HUMAN IMMUNODEFICIENCY VIRUS
LIHLYYFDCF

SEQ ID NO: 396 - protein, 10 aa, HUMAN IMMUNODEFICIENCY VIRUS
LIHMHYFDCF

SEQ ID NO: 397 - protein, 10 aa, HUMAN IMMUNODEFICIENCY VIRUS
SVKKLTEDRW

SEQ ID NO: 398 - protein, 11 aa, HUMAN IMMUNODEFICIENCY VIRUS
GVSIEWRLRRY

SEQ ID NO: 399 - protein, 11 aa, HUMAN IMMUNODEFICIENCY VIRUS
GLADQLIHMHY

SEQ ID NO: 400 - protein, 11 aa, HUMAN IMMUNODEFICIENCY VIRUS
QLIHLYYFDCF

SEQ ID NO: 401 - protein, 11 aa, HUMAN IMMUNODEFICIENCY VIRUS
QLIHMHYFDCF

SEQ ID NO: 402 - protein, 11 aa, HUMAN IMMUNODEFICIENCY VIRUS
PSVKKLTEDRW

SEQ ID NO: 403 - protein, 8 aa, HUMAN IMMUNODEFICIENCY VIRUS
KSEAVRHF

SEQ ID NO: 404 - protein, 8 aa, HUMAN IMMUNODEFICIENCY VIRUS
WLHGLGQY

SEQ ID NO: 405 - protein, 8 aa, HUMAN IMMUNODEFICIENCY VIRUS
RILQQLLF

SEQ ID NO: 406 - protein, 9 aa, HUMAN IMMUNODEFICIENCY VIRUS
AVRHFPRIW

SEQ ID NO: 407 - protein, 9 aa, HUMAN IMMUNODEFICIENCY VIRUS
AVRHFPRPW

SEQ ID NO: 408 - protein, 10 aa, HUMAN IMMUNODEFICIENCY VIRUS
ELKNEAVRHF

SEQ ID NO: 409 - protein, 10 aa, HUMAN IMMUNODEFICIENCY VIRUS
ELKSEAVRHF

SEQ ID NO: 410 - protein, 10 aa, HUMAN IMMUNODEFICIENCY VIRUS
WLHGLGQHIY

SEQ ID NO: 411 - protein, 10 aa, HUMAN IMMUNODEFICIENCY VIRUS
HIYETYGDTW

SEQ ID NO: 412 - protein, 10 aa, HUMAN IMMUNODEFICIENCY VIRUS
HIYNTYGDTW

SEQ ID NO: 413 - protein, 10 aa, HUMAN IMMUNODEFICIENCY VIRUS
YIYETYGDTW

SEQ ID NO: 414 - protein, 10 aa, HUMAN IMMUNODEFICIENCY VIRUS
IIRILQQLLF

SEQ ID NO: 415 - protein, 10 aa, HUMAN IMMUNODEFICIENCY VIRUS
ILQQLLFIHF

SEQ ID NO: 416 - protein, 11 aa, HUMAN IMMUNODEFICIENCY VIRUS
AIIRILQQLLF

SEQ ID NO: 417 - protein, 11 aa, HUMAN IMMUNODEFICIENCY VIRUS
RILQQLLFIHF

SEQ ID NO: 418 - protein, 8 aa, HUMAN IMMUNODEFICIENCY VIRUS
LIIAIVVW

SEQ ID NO: 419 - protein, 8 aa, HUMAN IMMUNODEFICIENCY VIRUS
IVVWTIVF

SEQ ID NO: 420 - protein, 8 aa, HUMAN IMMUNODEFICIENCY VIRUS
WTIVFIEY

SEQ ID NO: 421 - protein, 8 aa, HUMAN IMMUNODEFICIENCY VIRUS
EMGHHAPW

SEQ ID NO: 422 - protein, 9 aa, HUMAN IMMUNODEFICIENCY VIRUS
AIVVWTIVF

SEQ ID NO: 423 - protein, 10 aa, HUMAN IMMUNODEFICIENCY VIRUS
VVWTIVFIEY

SEQ ID NO: 424 - protein, 10 aa, HUMAN IMMUNODEFICIENCY VIRUS
GVEMGHHAPW

SEQ ID NO: 425 - protein, 11 aa, HUMAN IMMUNODEFICIENCY VIRUS
KVDYRIVIVAF

SEQ ID NO: 426 - protein, 11 aa, HUMAN IMMUNODEFICIENCY VIRUS
IVVWTIVFIEY

SEQ ID NO: 427 - protein, 11 aa, HUMAN IMMUNODEFICIENCY VIRUS
RIKEIRDDSDY

SEQ ID NO: 428 - protein, 11 aa, HUMAN IMMUNODEFICIENCY VIRUS
RIREIRDDSDY

SEQ ID NO: 429 - protein, 8 aa, HUMAN IMMUNODEFICIENCY VIRUS
LILGLVII

SEQ ID NO: 430 - protein, 8 aa, HUMAN IMMUNODEFICIENCY VIRUS
GLVIICSA

SEQ ID NO: 431 - protein, 8 aa, HUMAN IMMUNODEFICIENCY VIRUS
GMLMICSA

SEQ ID NO: 432 - protein, 8 aa, HUMAN IMMUNODEFICIENCY VIRUS
QLYATVYA

SEQ ID NO: 433 - protein, 8 aa, HUMAN IMMUNODEFICIENCY VIRUS
WVTVYYGV

SEQ ID NO: 434 - protein, 8 aa, HUMAN IMMUNODEFICIENCY VIRUS
TVYYGVPV

SEQ ID NO: 435 - protein, 8 aa, HUMAN IMMUNODEFICIENCY VIRUS
GVPVWKEA

SEQ ID NO: 436 - protein, 8 aa, HUMAN IMMUNODEFICIENCY VIRUS
PVWKEATT

SEQ ID NO: 437 - protein, 8 aa, HUMAN IMMUNODEFICIENCY VIRUS
ATTTLFCA

SEQ ID NO: 438 - protein, 8 aa, HUMAN IMMUNODEFICIENCY VIRUS
TLFCASDA

SEQ ID NO: 439 - protein, 8 aa, HUMAN IMMUNODEFICIENCY VIRUS
EVHNVWAT

SEQ ID NO: 440 - protein, 8 aa, HUMAN IMMUNODEFICIENCY VIRUS
ATHACVPT

SEQ ID NO: 441 - protein, 8 aa, HUMAN IMMUNODEFICIENCY VIRUS
NVTENFNM

SEQ ID NO: 442 - protein, 8 aa, HUMAN IMMUNODEFICIENCY VIRUS
NMWKNDMV

SEQ ID NO: 443 - protein, 8 aa, HUMAN IMMUNODEFICIENCY VIRUS
NMWKNNMV

SEQ ID NO: 444 - protein, 8 aa, HUMAN IMMUNODEFICIENCY VIRUS
EQMHEDII

SEQ ID NO: 445 - protein, 8 aa, HUMAN IMMUNODEFICIENCY VIRUS
DQSLKPCV

SEQ ID NO: 446 - protein, 8 aa, HUMAN IMMUNODEFICIENCY VIRUS
SLKPCVKL

SEQ ID NO: 447 - protein, 8 aa, HUMAN IMMUNODEFICIENCY VIRUS
KLTPLCVT

SEQ ID NO: 448 - protein, 8 aa, HUMAN IMMUNODEFICIENCY VIRUS
LTPLCVTL

SEQ ID NO: 449 - protein, 8 aa, HUMAN IMMUNODEFICIENCY VIRUS
VTSTGNSA

SEQ ID NO: 450 - protein, 8 aa, HUMAN IMMUNODEFICIENCY VIRUS
ALFYKLDV

SEQ ID NO: 451 - protein, 8 aa, HUMAN IMMUNODEFICIENCY VIRUS
ALFYRLDV

SEQ ID NO: 452 - protein, 8 aa, HUMAN IMMUNODEFICIENCY VIRUS
NISPKNNT

SEQ ID NO: 453 - protein, 8 aa, HUMAN IMMUNODEFICIENCY VIRUS
LINCNTSA

SEQ ID NO: 454 - protein, 8 aa, HUMAN IMMUNODEFICIENCY VIRUS
NTSAITQA

SEQ ID NO: 455 - protein, 8 aa, HUMAN IMMUNODEFICIENCY VIRUS
NTSVITQA

SEQ ID NO: 456 - protein, 8 aa, HUMAN IMMUNODEFICIENCY VIRUS
ITQACPKV

SEQ ID NO: 457 - protein, 8 aa, HUMAN IMMUNODEFICIENCY VIRUS
PIPIHYCA

SEQ ID NO: 458 - protein, 8 aa, HUMAN IMMUNODEFICIENCY VIRUS
PIPIHYCT

SEQ ID NO: 459 - protein, 8 aa, HUMAN IMMUNODEFICIENCY VIRUS
PIHYCAPA

SEQ ID NO: 460 - protein, 8 aa, HUMAN IMMUNODEFICIENCY VIRUS
PIHYCTPA

SEQ ID NO: 461 - protein, 8 aa, HUMAN IMMUNODEFICIENCY VIRUS
CAPAGFAI

SEQ ID NO: 462 - protein, 8 aa, HUMAN IMMUNODEFICIENCY VIRUS
CTPAGFAI

SEQ ID NO: 463 - protein, 8 aa, HUMAN IMMUNODEFICIENCY VIRUS
GTGPCKNV

SEQ ID NO: 464 - protein, 8 aa, HUMAN IMMUNODEFICIENCY VIRUS
NVSTVQCT

SEQ ID NO: 465 - protein, 8 aa, HUMAN IMMUNODEFICIENCY VIRUS
TVQCTHGI

SEQ ID NO: 466 - protein, 8 aa, HUMAN IMMUNODEFICIENCY VIRUS
CTHGIKPV

SEQ ID NO: 467 - protein, 8 aa, HUMAN IMMUNODEFICIENCY VIRUS
CTHGIRPV

SEQ ID NO: 468 - protein, 8 aa, HUMAN IMMUNODEFICIENCY VIRUS
GIKPVVST

SEQ ID NO: 469 - protein, 8 aa, HUMAN IMMUNODEFICIENCY VIRUS
GIRPVVST

SEQ ID NO: 470 - protein, 8 aa, HUMAN IMMUNODEFICIENCY VIRUS
PVVSTQLL

SEQ ID NO: 471 - protein, 8 aa, HUMAN IMMUNODEFICIENCY VIRUS
VVSTQLLL

SEQ ID NO: 472 - protein, 8 aa, HUMAN IMMUNODEFICIENCY VIRUS
QLLLNGSL

SEQ ID NO: 473 - protein, 8 aa, HUMAN IMMUNODEFICIENCY VIRUS
LLLNGSLA

SEQ ID NO: 474 - protein, 8 aa, HUMAN IMMUNODEFICIENCY VIRUS
SLAEEEVV

SEQ ID NO: 475 - protein, 8 aa, HUMAN IMMUNODEFICIENCY VIRUS
LAEEEVVI

SEQ ID NO: 476 - protein, 8 aa, HUMAN IMMUNODEFICIENCY VIRUS
IIRSENLT

SEQ ID NO: 477 - protein, 8 aa, HUMAN IMMUNODEFICIENCY VIRUS
CTRPNNNT

SEQ ID NO: 478 - protein, 8 aa, HUMAN IMMUNODEFICIENCY VIRUS
NTRKSIRI

SEQ ID NO: 479 - protein, 8 aa, HUMAN IMMUNODEFICIENCY VIRUS
NTSPRSRV

SEQ ID NO: 480 - protein, 8 aa, HUMAN IMMUNODEFICIENCY VIRUS
TAGNSSRA

SEQ ID NO: 481 - protein, 8 aa, HUMAN IMMUNODEFICIENCY VIRUS
IIGDIRQA

SEQ ID NO: 482 - protein, 8 aa, HUMAN IMMUNODEFICIENCY VIRUS
MQNGTNIT

SEQ ID NO: 483 - protein, 8 aa, HUMAN IMMUNODEFICIENCY VIRUS
HTEGNITL

SEQ ID NO: 484 - protein, 8 aa, HUMAN IMMUNODEFICIENCY VIRUS
NITLPCRI

SEQ ID NO: 485 - protein, 8 aa, HUMAN IMMUNODEFICIENCY VIRUS
TITLPCRI

SEQ ID NO: 486 - protein, 8 aa, HUMAN IMMUNODEFICIENCY VIRUS
RIKQIINM

SEQ ID NO: 487 - protein, 8 aa, HUMAN IMMUNODEFICIENCY VIRUS
RIKQIVNM

SEQ ID NO: 488 - protein, 8 aa, HUMAN IMMUNODEFICIENCY VIRUS
IINMWQEV

SEQ ID NO: 489 - protein, 8 aa, HUMAN IMMUNODEFICIENCY VIRUS
WQEVGKAM

SEQ ID NO: 490 - protein, 8 aa, HUMAN IMMUNODEFICIENCY VIRUS
WQRVGQAM

SEQ ID NO: 491 - protein, 8 aa, HUMAN IMMUNODEFICIENCY VIRUS
EVGKAMYA

SEQ ID NO: 492 - protein, 8 aa, HUMAN IMMUNODEFICIENCY VIRUS
RVGQAMYA

SEQ ID NO: 493 - protein, 8 aa, HUMAN IMMUNODEFICIENCY VIRUS
KAMYAPPI

SEQ ID NO: 494 - protein, 8 aa, HUMAN IMMUNODEFICIENCY VIRUS
QAMYAPPI

SEQ ID NO: 495 - protein, 8 aa, HUMAN IMMUNODEFICIENCY VIRUS
RAMYAPPI

SEQ ID NO: 496 - protein, 8 aa, HUMAN IMMUNODEFICIENCY VIRUS
QIRCSSNI

SEQ ID NO: 497 - protein, 8 aa, HUMAN IMMUNODEFICIENCY VIRUS
NITGLILT

SEQ ID NO: 498 - protein, 8 aa, HUMAN IMMUNODEFICIENCY VIRUS
NITGLLLT

SEQ ID NO: 499 - protein, 8 aa, HUMAN IMMUNODEFICIENCY VIRUS
ELYKYKVV

SEQ ID NO: 500 - protein, 8 aa, HUMAN IMMUNODEFICIENCY VIRUS
KVVKIEPL

SEQ ID NO: 501 - protein, 8 aa, HUMAN IMMUNODEFICIENCY VIRUS
KIEPLGVA

SEQ ID NO: 502 - protein, 8 aa, HUMAN IMMUNODEFICIENCY VIRUS
PTKAKRRV

SEQ ID NO: 503 - protein, 8 aa, HUMAN IMMUNODEFICIENCY VIRUS
VVEREKRA

SEQ ID NO: 504 - protein, 8 aa, HUMAN IMMUNODEFICIENCY VIRUS
VVQREKRA

SEQ ID NO: 505 - protein, 8 aa, HUMAN IMMUNODEFICIENCY VIRUS
VQREKRAV

SEQ ID NO: 506 - protein, 8 aa, HUMAN IMMUNODEFICIENCY VIRUS
RAVGIGAV

SEQ ID NO: 507 - protein, 8 aa, HUMAN IMMUNODEFICIENCY VIRUS
GALFLGFL

SEQ ID NO: 508 - protein, 8 aa, HUMAN IMMUNODEFICIENCY VIRUS
GAMFLGFL

SEQ ID NO: 509 - protein, 8 aa, HUMAN IMMUNODEFICIENCY VIRUS
GAVFLGFL

SEQ ID NO: 510 - protein, 8 aa, HUMAN IMMUNODEFICIENCY VIRUS
FLGFLGAA

SEQ ID NO: 511 - protein, 8 aa, HUMAN IMMUNODEFICIENCY VIRUS
FLGAAGST

SEQ ID NO: 512 - protein, 8 aa, HUMAN IMMUNODEFICIENCY VIRUS
AAGSTMGA

SEQ ID NO: 513 - protein, 8 aa, HUMAN IMMUNODEFICIENCY VIRUS
STMGAASI

SEQ ID NO: 514 - protein, 8 aa, HUMAN IMMUNODEFICIENCY VIRUS
TMGAASIT

SEQ ID NO: 515 - protein, 8 aa, HUMAN IMMUNODEFICIENCY VIRUS
GAASITLT

SEQ ID NO: 516 - protein, 8 aa, HUMAN IMMUNODEFICIENCY VIRUS
AASITLTV

SEQ ID NO: 517 - protein, 8 aa, HUMAN IMMUNODEFICIENCY VIRUS
SITLTVQA

SEQ ID NO: 518 - protein, 8 aa, HUMAN IMMUNODEFICIENCY VIRUS
LTVQARQL

SEQ ID NO: 519 - protein, 8 aa, HUMAN IMMUNODEFICIENCY VIRUS
TVQARQLL

SEQ ID NO: 520 - protein, 8 aa, HUMAN IMMUNODEFICIENCY VIRUS
RQLLSGIV

SEQ ID NO: 521 - protein, 8 aa, HUMAN IMMUNODEFICIENCY VIRUS
IVQQQNNL

SEQ ID NO: 522 - protein, 8 aa, HUMAN IMMUNODEFICIENCY VIRUS
IVQQQSNL

SEQ ID NO: 523 - protein, 8 aa, HUMAN IMMUNODEFICIENCY VIRUS
VQQQNNLL

SEQ ID NO: 524 - protein, 8 aa, HUMAN IMMUNODEFICIENCY VIRUS
VQQQSNLL

SEQ ID NO: 525 - protein, 8 aa, HUMAN IMMUNODEFICIENCY VIRUS
QQNNLLRA

SEQ ID NO: 526 - protein, 8 aa, HUMAN IMMUNODEFICIENCY VIRUS
QQSNLLRA

SEQ ID NO: 527 - protein, 8 aa, HUMAN IMMUNODEFICIENCY VIRUS
NLLRAIEA

SEQ ID NO: 528 - protein, 8 aa, HUMAN IMMUNODEFICIENCY VIRUS
AIEAQQHL

SEQ ID NO: 529 - protein, 8 aa, HUMAN IMMUNODEFICIENCY VIRUS
AQQHLLKL

SEQ ID NO: 530 - protein, 8 aa, HUMAN IMMUNODEFICIENCY VIRUS
AQQHLLQL

SEQ ID NO: 531 - protein, 8 aa, HUMAN IMMUNODEFICIENCY VIRUS
AQQHMLQL

SEQ ID NO: 532 - protein, 8 aa, HUMAN IMMUNODEFICIENCY VIRUS
QQHLLKLT

SEQ ID NO: 533 - protein, 8 aa, HUMAN IMMUNODEFICIENCY VIRUS
QQHLLQLT

SEQ ID NO: 534 - protein, 8 aa, HUMAN IMMUNODEFICIENCY VIRUS
QQHMLQLT

SEQ ID NO: 535 - protein, 8 aa, HUMAN IMMUNODEFICIENCY VIRUS
LQLTVWGI

SEQ ID NO: 536 - protein, 8 aa, HUMAN IMMUNODEFICIENCY VIRUS
TVWGIKQL

SEQ ID NO: 537 - protein, 8 aa, HUMAN IMMUNODEFICIENCY VIRUS
KQLQARVL

SEQ ID NO: 538 - protein, 8 aa, HUMAN IMMUNODEFICIENCY VIRUS
QLQARVLA

SEQ ID NO: 539 - protein, 8 aa, HUMAN IMMUNODEFICIENCY VIRUS
LQARVLAV

SEQ ID NO: 540 - protein, 8 aa, HUMAN IMMUNODEFICIENCY VIRUS
VLAVERYL

SEQ ID NO: 541 - protein, 8 aa, HUMAN IMMUNODEFICIENCY VIRUS
YLKDQQLL

SEQ ID NO: 542 - protein, 8 aa, HUMAN IMMUNODEFICIENCY VIRUS
YLRDQQLL

SEQ ID NO: 543 - protein, 8 aa, HUMAN IMMUNODEFICIENCY VIRUS
KLICTTAV

SEQ ID NO: 544 - protein, 8 aa, HUMAN IMMUNODEFICIENCY VIRUS
KLICTTNV

SEQ ID NO: 545 - protein, 8 aa, HUMAN IMMUNODEFICIENCY VIRUS
KLICTTTV

SEQ ID NO: 546 - protein, 8 aa, HUMAN IMMUNODEFICIENCY VIRUS
WMEWEREI

SEQ ID NO: 547 - protein, 8 aa, HUMAN IMMUNODEFICIENCY VIRUS
LLALDKWA

SEQ ID NO: 548 - protein, 8 aa, HUMAN IMMUNODEFICIENCY VIRUS
LLELDKWA

SEQ ID NO: 549 - protein, 8 aa, HUMAN IMMUNODEFICIENCY VIRUS
ALDKWASL

SEQ ID NO: 550 - protein, 8 aa, HUMAN IMMUNODEFICIENCY VIRUS
ELDKWASL

SEQ ID NO: 551 - protein, 8 aa, HUMAN IMMUNODEFICIENCY VIRUS
SLWNWFDI

SEQ ID NO: 552 - protein, 8 aa, HUMAN IMMUNODEFICIENCY VIRUS
ITKWLWYI

SEQ ID NO: 553 - protein, 8 aa, HUMAN IMMUNODEFICIENCY VIRUS
ITNWLWYI

SEQ ID NO: 554 - protein, 8 aa, HUMAN IMMUNODEFICIENCY VIRUS
YIKIFIMI

SEQ ID NO: 555 - protein, 8 aa, HUMAN IMMUNODEFICIENCY VIRUS
FIMIVGGL

SEQ ID NO: 556 - protein, 8 aa, HUMAN IMMUNODEFICIENCY VIRUS
IMIVGGLI

SEQ ID NO: 557 - protein, 8 aa, HUMAN IMMUNODEFICIENCY VIRUS
IVGGLIGL

SEQ ID NO: 558 - protein, 8 aa, HUMAN IMMUNODEFICIENCY VIRUS
IVGGLVGL

SEQ ID NO: 559 - protein, 8 aa, HUMAN IMMUNODEFICIENCY VIRUS
GLIGLRII

SEQ ID NO: 560 - protein, 8 aa, HUMAN IMMUNODEFICIENCY VIRUS
GLIGLRIV

SEQ ID NO: 561 - protein, 8 aa, HUMAN IMMUNODEFICIENCY VIRUS
GLRIIFAV

SEQ ID NO: 562 - protein, 8 aa, HUMAN IMMUNODEFICIENCY VIRUS
GLRIVFAV

SEQ ID NO: 563 - protein, 8 aa, HUMAN IMMUNODEFICIENCY VIRUS
IIFAVLSI

SEQ ID NO: 564 - protein, 8 aa, HUMAN IMMUNODEFICIENCY VIRUS
IVFAVLSI

SEQ ID NO: 565 - protein, 8 aa, HUMAN IMMUNODEFICIENCY VIRUS
VLSIVNRV

SEQ ID NO: 566 - protein, 8 aa, HUMAN IMMUNODEFICIENCY VIRUS
PLSFQTLL

SEQ ID NO: 567 - protein, 8 aa, HUMAN IMMUNODEFICIENCY VIRUS
PLSFQTLT

SEQ ID NO: 568 - protein, 8 aa, HUMAN IMMUNODEFICIENCY VIRUS
GLDRPGGT

SEQ ID NO: 569 - protein, 8 aa, HUMAN IMMUNODEFICIENCY VIRUS
RLVNGFLA

SEQ ID NO: 570 - protein, 8 aa, HUMAN IMMUNODEFICIENCY VIRUS
RLVSGFLA

SEQ ID NO: 571 - protein, 8 aa, HUMAN IMMUNODEFICIENCY VIRUS
LVNGFLAL

SEQ ID NO: 572 - protein, 8 aa, HUMAN IMMUNODEFICIENCY VIRUS
LVSGFLAL

SEQ ID NO: 573 - protein, 8 aa, HUMAN IMMUNODEFICIENCY VIRUS
LALAWDDL

SEQ ID NO: 574 - protein, 8 aa, HUMAN IMMUNODEFICIENCY VIRUS
CLFSYHRL

SEQ ID NO: 575 - protein, 8 aa, HUMAN IMMUNODEFICIENCY VIRUS
RLRDLLLI

SEQ ID NO: 576 - protein, 8 aa, HUMAN IMMUNODEFICIENCY VIRUS
IAARTVEL

SEQ ID NO: 577 - protein, 8 aa, HUMAN IMMUNODEFICIENCY VIRUS
AARTVELL

SEQ ID NO: 578 - protein, 8 aa, HUMAN IMMUNODEFICIENCY VIRUS
ELLGHSSL

SEQ ID NO: 579 - protein, 8 aa, HUMAN IMMUNODEFICIENCY VIRUS
LQYWSQEL

SEQ ID NO: 580 - protein, 8 aa, HUMAN IMMUNODEFICIENCY VIRUS
GQELKNSA

SEQ ID NO: 581 - protein, 8 aa, HUMAN IMMUNODEFICIENCY VIRUS
SQELKNSA

SEQ ID NO: 582 - protein, 8 aa, HUMAN IMMUNODEFICIENCY VIRUS
SAVSLLNA

SEQ ID NO: 583 - protein, 8 aa, HUMAN IMMUNODEFICIENCY VIRUS
AVSLLNAT

SEQ ID NO: 584 - protein, 8 aa, HUMAN IMMUNODEFICIENCY VIRUS
SLLNATAI

SEQ ID NO: 585 - protein, 8 aa, HUMAN IMMUNODEFICIENCY VIRUS
LLNATAIA

SEQ ID NO: 586 - protein, 8 aa, HUMAN IMMUNODEFICIENCY VIRUS
DTIAIAVA

SEQ ID NO: 587 - protein, 8 aa, HUMAN IMMUNODEFICIENCY VIRUS
NATAIAVA

SEQ ID NO: 588 - protein, 8 aa, HUMAN IMMUNODEFICIENCY VIRUS
AIAVAEGT

SEQ ID NO: 589 - protein, 8 aa, HUMAN IMMUNODEFICIENCY VIRUS
VAEGTDRI

SEQ ID NO: 590 - protein, 8 aa, HUMAN IMMUNODEFICIENCY VIRUS
VAEGTDRV

SEQ ID NO: 591 - protein, 8 aa, HUMAN IMMUNODEFICIENCY VIRUS
GTDRVIEV

SEQ ID NO: 592 - protein, 8 aa, HUMAN IMMUNODEFICIENCY VIRUS
ILHIPRRI

SEQ ID NO: 593 - protein, 8 aa, HUMAN IMMUNODEFICIENCY VIRUS
PTRIRQGL

SEQ ID NO: 594 - protein, 8 aa, HUMAN IMMUNODEFICIENCY VIRUS
RQGLERAL

SEQ ID NO: 595 - protein, 9 aa, HUMAN IMMUNODEFICIENCY VIRUS
VTVYYGVPV

SEQ ID NO: 596 - protein, 9 aa, HUMAN IMMUNODEFICIENCY VIRUS
GVPVWKEAT

SEQ ID NO: 597 - protein, 9 aa, HUMAN IMMUNODEFICIENCY VIRUS
PVWKEATTT

SEQ ID NO: 598 - protein, 9 aa, HUMAN IMMUNODEFICIENCY VIRUS
EATTTLFCA

SEQ ID NO: 599 - protein, 9 aa, HUMAN IMMUNODEFICIENCY VIRUS
TTLFCASDA

SEQ ID NO: 600 - protein, 9 aa, HUMAN IMMUNODEFICIENCY VIRUS
DAKAYDTEV

SEQ ID NO: 601 - protein, 9 aa, HUMAN IMMUNODEFICIENCY VIRUS
DTEVHNVWA

SEQ ID NO: 602 - protein, 9 aa, HUMAN IMMUNODEFICIENCY VIRUS
NVWATHACV

SEQ ID NO: 603 - protein, 9 aa, HUMAN IMMUNODEFICIENCY VIRUS
WATHACVPT

SEQ ID NO: 604 - protein, 9 aa, HUMAN IMMUNODEFICIENCY VIRUS
PTDPNPQEI

SEQ ID NO: 605 - protein, 9 aa, HUMAN IMMUNODEFICIENCY VIRUS
PTDPNPQEV

SEQ ID NO: 606 - protein, 9 aa, HUMAN IMMUNODEFICIENCY VIRUS
MVEQMHEDI

SEQ ID NO: 607 - protein, 9 aa, HUMAN IMMUNODEFICIENCY VIRUS
QMHEDIISL

SEQ ID NO: 608 - protein, 9 aa, HUMAN IMMUNODEFICIENCY VIRUS
IISLWDQSL

SEQ ID NO: 609 - protein, 9 aa, HUMAN IMMUNODEFICIENCY VIRUS
VISLWDQSL

SEQ ID NO: 610 - protein, 9 aa, HUMAN IMMUNODEFICIENCY VIRUS
SLKPCVKLT

SEQ ID NO: 611 - protein, 9 aa, HUMAN IMMUNODEFICIENCY VIRUS
CVKLTPLCV

SEQ ID NO: 612 - protein, 9 aa, HUMAN IMMUNODEFICIENCY VIRUS
KLTPLCVTL

SEQ ID NO: 613 - protein, 9 aa, HUMAN IMMUNODEFICIENCY VIRUS
PLCVTLNCT

SEQ ID NO: 614 - protein, 9 aa, HUMAN IMMUNODEFICIENCY VIRUS
EIKNCSFNI

SEQ ID NO: 615 - protein, 9 aa, HUMAN IMMUNODEFICIENCY VIRUS
ALFYRLDVV

SEQ ID NO: 616 - protein, 9 aa, HUMAN IMMUNODEFICIENCY VIRUS
VQNNNNSNT

SEQ ID NO: 617 - protein, 9 aa, HUMAN IMMUNODEFICIENCY VIRUS
RLINCNTSA

SEQ ID NO: 618 - protein, 9 aa, HUMAN IMMUNODEFICIENCY VIRUS
LINCNTSAI

SEQ ID NO: 619 - protein, 9 aa, HUMAN IMMUNODEFICIENCY VIRUS
AITQACPKV

SEQ ID NO: 620 - protein, 9 aa, HUMAN IMMUNODEFICIENCY VIRUS
VITQACPKV

SEQ ID NO: 621 - protein, 9 aa, HUMAN IMMUNODEFICIENCY VIRUS
KVSFEPIPI

SEQ ID NO: 622 - protein, 9 aa, HUMAN IMMUNODEFICIENCY VIRUS
CAPAGFAIL

SEQ ID NO: 623 - protein, 9 aa, HUMAN IMMUNODEFICIENCY VIRUS
STVQCTHGI

SEQ ID NO: 624 - protein, 9 aa, HUMAN IMMUNODEFICIENCY VIRUS
CTHGIKPVV

SEQ ID NO: 625 - protein, 9 aa, HUMAN IMMUNODEFICIENCY VIRUS
CTHGIRPVV

SEQ ID NO: 626 - protein, 9 aa, HUMAN IMMUNODEFICIENCY VIRUS
PVVSTQLLL

SEQ ID NO: 627 - protein, 9 aa, HUMAN IMMUNODEFICIENCY VIRUS
TQLLLNGSL

SEQ ID NO: 628 - protein, 9 aa, HUMAN IMMUNODEFICIENCY VIRUS
QLLLNGSLA

SEQ ID NO: 629 - protein, 9 aa, HUMAN IMMUNODEFICIENCY VIRUS
SLAEEEVVI

SEQ ID NO: 630 - protein, 9 aa, HUMAN IMMUNODEFICIENCY VIRUS
NAKTIIVQL

SEQ ID NO: 631 - protein, 9 aa, HUMAN IMMUNODEFICIENCY VIRUS
ATGDIIGDI

SEQ ID NO: 632 - protein, 9 aa, HUMAN IMMUNODEFICIENCY VIRUS
DIIGDIRQA

SEQ ID NO: 633 - protein, 9 aa, HUMAN IMMUNODEFICIENCY VIRUS
EIIGDIRQA

SEQ ID NO: 634 - protein, 9 aa, HUMAN IMMUNODEFICIENCY VIRUS
GTAGNSSRA

SEQ ID NO: 635 - protein, 9 aa, HUMAN IMMUNODEFICIENCY VIRUS
NTSPRSRVA

SEQ ID NO: 636 - protein, 9 aa, HUMAN IMMUNODEFICIENCY VIRUS
TAGNSSRAA

SEQ ID NO: 637 - protein, 9 aa, HUMAN IMMUNODEFICIENCY VIRUS
DIRQAHCNI

SEQ ID NO: 638 - protein, 9 aa, HUMAN IMMUNODEFICIENCY VIRUS
DIRQAHCNV

SEQ ID NO: 639 - protein, 9 aa, HUMAN IMMUNODEFICIENCY VIRUS
TLPCRIKQI

SEQ ID NO: 640 - protein, 9 aa, HUMAN IMMUNODEFICIENCY VIRUS
QIINMWQEV

SEQ ID NO: 641 - protein, 9 aa, HUMAN IMMUNODEFICIENCY VIRUS
NMWQEVGKA

SEQ ID NO: 642 - protein, 9 aa, HUMAN IMMUNODEFICIENCY VIRUS
GQAMYAPPI

SEQ ID NO: 643 - protein, 9 aa, HUMAN IMMUNODEFICIENCY VIRUS
GQIRCSSNI

SEQ ID NO: 644 - protein, 9 aa, HUMAN IMMUNODEFICIENCY VIRUS
QIRCSSNIT

SEQ ID NO: 645 - protein, 9 aa, HUMAN IMMUNODEFICIENCY VIRUS
NTETNKTET

SEQ ID NO: 646 - protein, 9 aa, HUMAN IMMUNODEFICIENCY VIRUS
NTTGNTTET

SEQ ID NO: 647 - protein, 9 aa, HUMAN IMMUNODEFICIENCY VIRUS
VVKIEPLGV

SEQ ID NO: 648 - protein, 9 aa, HUMAN IMMUNODEFICIENCY VIRUS
PLGVAPTKA

SEQ ID NO: 649 - protein, 9 aa, HUMAN IMMUNODEFICIENCY VIRUS
PTKAKRRVV

SEQ ID NO: 650 - protein, 9 aa, HUMAN IMMUNODEFICIENCY VIRUS
RVVEREKRA

SEQ ID NO: 651 - protein, 9 aa, HUMAN IMMUNODEFICIENCY VIRUS
RVVQREKRA

SEQ ID NO: 652 - protein, 9 aa, HUMAN IMMUNODEFICIENCY VIRUS
VVEREKRAV

SEQ ID NO: 653 - protein, 9 aa, HUMAN IMMUNODEFICIENCY VIRUS
VVQREKRAV

SEQ ID NO: 654 - protein, 9 aa, HUMAN IMMUNODEFICIENCY VIRUS
AVGIGAVFL

SEQ ID NO: 655 - protein, 9 aa, HUMAN IMMUNODEFICIENCY VIRUS
ALFLGFLGA

SEQ ID NO: 656 - protein, 9 aa, HUMAN IMMUNODEFICIENCY VIRUS
AMFLGFLGA

SEQ ID NO: 657 - protein, 9 aa, HUMAN IMMUNODEFICIENCY VIRUS
AVFLGFLGA

SEQ ID NO: 658 - protein, 9 aa, HUMAN IMMUNODEFICIENCY VIRUS
FLGAAGSTM

SEQ ID NO: 659 - protein, 9 aa, HUMAN IMMUNODEFICIENCY VIRUS
GAAGSTMGA

SEQ ID NO: 660 - protein, 9 aa, HUMAN IMMUNODEFICIENCY VIRUS
AAGSTMGAA

SEQ ID NO: 661 - protein, 9 aa, HUMAN IMMUNODEFICIENCY VIRUS
STMGAASIT

SEQ ID NO: 662 - protein, 9 aa, HUMAN IMMUNODEFICIENCY VIRUS
TMGAASITL

SEQ ID NO: 663 - protein, 9 aa, HUMAN IMMUNODEFICIENCY VIRUS
GAASITLTV

SEQ ID NO: 664 - protein, 9 aa, HUMAN IMMUNODEFICIENCY VIRUS
TLTVQARQL

SEQ ID NO: 665 - protein, 9 aa, HUMAN IMMUNODEFICIENCY VIRUS
LTVQARQLL

SEQ ID NO: 666 - protein, 9 aa, HUMAN IMMUNODEFICIENCY VIRUS
QARQLLSGI

SEQ ID NO: 667 - protein, 9 aa, HUMAN IMMUNODEFICIENCY VIRUS
GIVQQQNNL

SEQ ID NO: 668 - protein, 9 aa, HUMAN IMMUNODEFICIENCY VIRUS
GIVQQQSNL

SEQ ID NO: 669 - protein, 9 aa, HUMAN IMMUNODEFICIENCY VIRUS
IVQQQNNLL

SEQ ID NO: 670 - protein, 9 aa, HUMAN IMMUNODEFICIENCY VIRUS
IVQQQSNLL

SEQ ID NO: 671 - protein, 9 aa, HUMAN IMMUNODEFICIENCY VIRUS
QQQNNLLRA

SEQ ID NO: 672 - protein, 9 aa, HUMAN IMMUNODEFICIENCY VIRUS
QQQSNLLRA

SEQ ID NO: 673 - protein, 9 aa, HUMAN IMMUNODEFICIENCY VIRUS
QQNNLLRAI

SEQ ID NO: 674 - protein, 9 aa, HUMAN IMMUNODEFICIENCY VIRUS
QQSNLLRAI

SEQ ID NO: 675 - protein, 9 aa, HUMAN IMMUNODEFICIENCY VIRUS
RAIEAQQHL

SEQ ID NO: 676 - protein, 9 aa, HUMAN IMMUNODEFICIENCY VIRUS
AIEAQQHLL

SEQ ID NO: 677 - protein, 9 aa, HUMAN IMMUNODEFICIENCY VIRUS
EAQQHLLKL

SEQ ID NO: 678 - protein, 9 aa, HUMAN IMMUNODEFICIENCY VIRUS
EAQQHLLQL

SEQ ID NO: 679 - protein, 9 aa, HUMAN IMMUNODEFICIENCY VIRUS
AQQHLLKLT

SEQ ID NO: 680 - protein, 9 aa, HUMAN IMMUNODEFICIENCY VIRUS
AQQHLLQLT

SEQ ID NO: 681 - protein, 9 aa, HUMAN IMMUNODEFICIENCY VIRUS
AQQHMLQLT

SEQ ID NO: 682 - protein, 9 aa, HUMAN IMMUNODEFICIENCY VIRUS
QQHLLKLTV

SEQ ID NO: 683 - protein, 9 aa, HUMAN IMMUNODEFICIENCY VIRUS
QQHLLQLTV

SEQ ID NO: 684 - protein, 9 aa, HUMAN IMMUNODEFICIENCY VIRUS
LLKLTVWGI

SEQ ID NO: 685 - protein, 9 aa, HUMAN IMMUNODEFICIENCY VIRUS
LLQLTVWGI

SEQ ID NO: 686 - protein, 9 aa, HUMAN IMMUNODEFICIENCY VIRUS
MLQLTVWGI

SEQ ID NO: 687 - protein, 9 aa, HUMAN IMMUNODEFICIENCY VIRUS
LTVWGIKQL

SEQ ID NO: 688 - protein, 9 aa, HUMAN IMMUNODEFICIENCY VIRUS
GIKQLQARV

SEQ ID NO: 689 - protein, 9 aa, HUMAN IMMUNODEFICIENCY VIRUS
KQLQARVLA

SEQ ID NO: 690 - protein, 9 aa, HUMAN IMMUNODEFICIENCY VIRUS
QLQARVLAV

SEQ ID NO: 691 - protein, 9 aa, HUMAN IMMUNODEFICIENCY VIRUS
RVLAVERYL

SEQ ID NO: 692 - protein, 9 aa, HUMAN IMMUNODEFICIENCY VIRUS
GIWGCSGKL

SEQ ID NO: 693 - protein, 9 aa, HUMAN IMMUNODEFICIENCY VIRUS
QQEKNEQDL

SEQ ID NO: 694 - protein, 9 aa, HUMAN IMMUNODEFICIENCY VIRUS
QQEKNEQEL

SEQ ID NO: 695 - protein, 9 aa, HUMAN IMMUNODEFICIENCY VIRUS
DLLALDKWA

SEQ ID NO: 696 - protein, 9 aa, HUMAN IMMUNODEFICIENCY VIRUS
ELLELDKWA

SEQ ID NO: 697 - protein, 9 aa, HUMAN IMMUNODEFICIENCY VIRUS
LALDKWASL

SEQ ID NO: 698 - protein, 9 aa, HUMAN IMMUNODEFICIENCY VIRUS
SLWNWFDIT

SEQ ID NO: 699 - protein, 9 aa, HUMAN IMMUNODEFICIENCY VIRUS
DITNWLWYI

SEQ ID NO: 700 - protein, 9 aa, HUMAN IMMUNODEFICIENCY VIRUS
WLWYIKIFI

SEQ ID NO: 701 - protein, 9 aa, HUMAN IMMUNODEFICIENCY VIRUS
YIKIFIMIV

SEQ ID NO: 702 - protein, 9 aa, HUMAN IMMUNODEFICIENCY VIRUS
FIMIVGGLI

SEQ ID NO: 703 - protein, 9 aa, HUMAN IMMUNODEFICIENCY VIRUS
MIVGGLIGL

SEQ ID NO: 704 - protein, 9 aa, HUMAN IMMUNODEFICIENCY VIRUS
LIGLRIIFA

SEQ ID NO: 705 - protein, 9 aa, HUMAN IMMUNODEFICIENCY VIRUS
LIGLRIVFA

SEQ ID NO: 706 - protein, 9 aa, HUMAN IMMUNODEFICIENCY VIRUS
GLRIIFAVL

SEQ ID NO: 707 - protein, 9 aa, HUMAN IMMUNODEFICIENCY VIRUS
GLRIVFAVL

SEQ ID NO: 708 - protein, 9 aa, HUMAN IMMUNODEFICIENCY VIRUS
RIIFAVLSI

SEQ ID NO: 709 - protein, 9 aa, HUMAN IMMUNODEFICIENCY VIRUS
RIVFAVLSI

SEQ ID NO: 710 - protein, 9 aa, HUMAN IMMUNODEFICIENCY VIRUS
IIFAVLSIV

SEQ ID NO: 711 - protein, 9 aa, HUMAN IMMUNODEFICIENCY VIRUS
IVFAVLSIV

SEQ ID NO: 712 - protein, 9 aa, HUMAN IMMUNODEFICIENCY VIRUS
AVLSIVNRV

SEQ ID NO: 713 - protein, 9 aa, HUMAN IMMUNODEFICIENCY VIRUS
RVRQGYSPL

SEQ ID NO: 714 - protein, 9 aa, HUMAN IMMUNODEFICIENCY VIRUS
SIRLVNGFL

SEQ ID NO: 715 - protein, 9 aa, HUMAN IMMUNODEFICIENCY VIRUS
SIRLVSGFL

SEQ ID NO: 716 - protein, 9 aa, HUMAN IMMUNODEFICIENCY VIRUS
RLVNGFLAL

SEQ ID NO: 717 - protein, 9 aa, HUMAN IMMUNODEFICIENCY VIRUS
RLVSGFLAL

SEQ ID NO: 718 - protein, 9 aa, HUMAN IMMUNODEFICIENCY VIRUS
LVSGFLALA

SEQ ID NO: 719 - protein, 9 aa, HUMAN IMMUNODEFICIENCY VIRUS
FLALAWDDL

SEQ ID NO: 720 - protein, 9 aa, HUMAN IMMUNODEFICIENCY VIRUS
LAWDDLRSL

SEQ ID NO: 721 - protein, 9 aa, HUMAN IMMUNODEFICIENCY VIRUS
LIAARTVEL

SEQ ID NO: 722 - protein, 9 aa, HUMAN IMMUNODEFICIENCY VIRUS
IAARTVELL

SEQ ID NO: 723 - protein, 9 aa, HUMAN IMMUNODEFICIENCY VIRUS
LLGRRGWEA

SEQ ID NO: 724 - protein, 9 aa, HUMAN IMMUNODEFICIENCY VIRUS
GLRLGWEGL

SEQ ID NO: 725 - protein, 9 aa, HUMAN IMMUNODEFICIENCY VIRUS
LLQYWSQEL

SEQ ID NO: 726 - protein, 9 aa, HUMAN IMMUNODEFICIENCY VIRUS
GQELKNSAI

SEQ ID NO: 727 - protein, 9 aa, HUMAN IMMUNODEFICIENCY VIRUS
SQELKNSAV

SEQ ID NO: 728 - protein, 9 aa, HUMAN IMMUNODEFICIENCY VIRUS
ELKNSAINL

SEQ ID NO: 729 - protein, 9 aa, HUMAN IMMUNODEFICIENCY VIRUS
ELKNSAISL

SEQ ID NO: 730 - protein, 9 aa, HUMAN IMMUNODEFICIENCY VIRUS
ELKNSAVSL

SEQ ID NO: 731 - protein, 9 aa, HUMAN IMMUNODEFICIENCY VIRUS
SAVSLLNAT

SEQ ID NO: 732 - protein, 9 aa, HUMAN IMMUNODEFICIENCY VIRUS
AVSLLNATA

SEQ ID NO: 733 - protein, 9 aa, HUMAN IMMUNODEFICIENCY VIRUS
SLLNATAIA

SEQ ID NO: 734 - protein, 9 aa, HUMAN IMMUNODEFICIENCY VIRUS
LLNATAIAV

SEQ ID NO: 735 - protein, 9 aa, HUMAN IMMUNODEFICIENCY VIRUS
IAIAVAEGT

SEQ ID NO: 736 - protein, 9 aa, HUMAN IMMUNODEFICIENCY VIRUS
TAIAVAEGT

SEQ ID NO: 737 - protein, 9 aa, HUMAN IMMUNODEFICIENCY VIRUS
AVAEGTDRI

SEQ ID NO: 738 - protein, 9 aa, HUMAN IMMUNODEFICIENCY VIRUS
AVAEGTDRV

SEQ ID NO: 739 - protein, 9 aa, HUMAN IMMUNODEFICIENCY VIRUS
VAEGTDRII

SEQ ID NO: 740 - protein, 9 aa, HUMAN IMMUNODEFICIENCY VIRUS
VAEGTDRVI

SEQ ID NO: 741 - protein, 9 aa, HUMAN IMMUNODEFICIENCY VIRUS
AILHIPRRI

SEQ ID NO: 742 - protein, 9 aa, HUMAN IMMUNODEFICIENCY VIRUS
RIRQGLERA

SEQ ID NO: 743 - protein, 9 aa, HUMAN IMMUNODEFICIENCY VIRUS
RQGLERALL

SEQ ID NO: 744 - protein, 10 aa, HUMAN IMMUNODEFICIENCY VIRUS
ILGLVIICSA

SEQ ID NO: 745 - protein, 10 aa, HUMAN IMMUNODEFICIENCY VIRUS
LLGMLMICSA

SEQ ID NO: 746 - protein, 10 aa, HUMAN IMMUNODEFICIENCY VIRUS
QLYATVYAGV

SEQ ID NO: 747 - protein, 10 aa, HUMAN IMMUNODEFICIENCY VIRUS
KLWVTVYYGV

SEQ ID NO: 748 - protein, 10 aa, HUMAN IMMUNODEFICIENCY VIRUS
NLWVTVYYGV

SEQ ID NO: 749 - protein, 10 aa, HUMAN IMMUNODEFICIENCY VIRUS
WVTVYYGVPV

SEQ ID NO: 750 - protein, 10 aa, HUMAN IMMUNODEFICIENCY VIRUS
GVPVWKEATT

SEQ ID NO: 751 - protein, 10 aa, HUMAN IMMUNODEFICIENCY VIRUS
PVWKEATTTL

SEQ ID NO: 752 - protein, 10 aa, HUMAN IMMUNODEFICIENCY VIRUS
KTTLFCASDA

SEQ ID NO: 753 - protein, 10 aa, HUMAN IMMUNODEFICIENCY VIRUS
TTTLFCASDA

SEQ ID NO: 754 - protein, 10 aa, HUMAN IMMUNODEFICIENCY VIRUS
TLFCASDAKA

SEQ ID NO: 755 - protein, 10 aa, HUMAN IMMUNODEFICIENCY VIRUS
CASDAKAYDT

SEQ ID NO: 756 - protein, 10 aa, HUMAN IMMUNODEFICIENCY VIRUS
KAYDTEVHNV

SEQ ID NO: 757 - protein, 10 aa, HUMAN IMMUNODEFICIENCY VIRUS
DTEVHNVWAT

SEQ ID NO: 758 - protein, 10 aa, HUMAN IMMUNODEFICIENCY VIRUS
EVHNVWATHA

SEQ ID NO: 759 - protein, 10 aa, HUMAN IMMUNODEFICIENCY VIRUS
PTDPNPQEVV

SEQ ID NO: 760 - protein, 10 aa, HUMAN IMMUNODEFICIENCY VIRUS
NMVEQMHEDI

SEQ ID NO: 761 - protein, 10 aa, HUMAN IMMUNODEFICIENCY VIRUS
MVEQMHEDII

SEQ ID NO: 762 - protein, 10 aa, HUMAN IMMUNODEFICIENCY VIRUS
EQMHEDIISL

SEQ ID NO: 763 - protein, 10 aa, HUMAN IMMUNODEFICIENCY VIRUS
DIISLWDQSL

SEQ ID NO: 764 - protein, 10 aa, HUMAN IMMUNODEFICIENCY VIRUS
DVISLWDQSL

SEQ ID NO: 765 - protein, 10 aa, HUMAN IMMUNODEFICIENCY VIRUS
DQSLKPCVKL

SEQ ID NO: 766 - protein, 10 aa, HUMAN IMMUNODEFICIENCY VIRUS
CVKLTPLCVT

SEQ ID NO: 767 - protein, 10 aa, HUMAN IMMUNODEFICIENCY VIRUS
STSNSSNSST

SEQ ID NO: 768 - protein, 10 aa, HUMAN IMMUNODEFICIENCY VIRUS
VTSTGNSAGT

SEQ ID NO: 769 - protein, 10 aa, HUMAN IMMUNODEFICIENCY VIRUS
EIKNCSFNIT

SEQ ID NO: 770 - protein, 10 aa, HUMAN IMMUNODEFICIENCY VIRUS
SVQNNNNSNT

SEQ ID NO: 771 - protein, 10 aa, HUMAN IMMUNODEFICIENCY VIRUS
RLINCNTSAI

SEQ ID NO: 772 - protein, 10 aa, HUMAN IMMUNODEFICIENCY VIRUS
LINCNTSAIT

SEQ ID NO: 773 - protein, 10 aa, HUMAN IMMUNODEFICIENCY VIRUS
SAITQACPKV

SEQ ID NO: 774 - protein, 10 aa, HUMAN IMMUNODEFICIENCY VIRUS
SVITQACPKV

SEQ ID NO: 775 - protein, 10 aa, HUMAN IMMUNODEFICIENCY VIRUS
PIPIHYCAPA

SEQ ID NO: 776 - protein, 10 aa, HUMAN IMMUNODEFICIENCY VIRUS
PIPIHYCTPA

SEQ ID NO: 777 - protein, 10 aa, HUMAN IMMUNODEFICIENCY VIRUS
GTGPCKNVST

SEQ ID NO: 778 - protein, 10 aa, HUMAN IMMUNODEFICIENCY VIRUS
CTNVSTVQCT

SEQ ID NO: 779 - protein, 10 aa, HUMAN IMMUNODEFICIENCY VIRUS
VQCTHGIKPV

SEQ ID NO: 780 - protein, 10 aa, HUMAN IMMUNODEFICIENCY VIRUS
VQCTHGIRPV

SEQ ID NO: 781 - protein, 10 aa, HUMAN IMMUNODEFICIENCY VIRUS
GIKPVVSTQL

SEQ ID NO: 782 - protein, 10 aa, HUMAN IMMUNODEFICIENCY VIRUS
GIRPVVSTQL

SEQ ID NO: 783 - protein, 10 aa, HUMAN IMMUNODEFICIENCY VIRUS
STQLLLNGSL

SEQ ID NO: 784 - protein, 10 aa, HUMAN IMMUNODEFICIENCY VIRUS
TQLLLNGSLA

SEQ ID NO: 785 - protein, 10 aa, HUMAN IMMUNODEFICIENCY VIRUS
RIGPGQTFYA

SEQ ID NO: 786 - protein, 10 aa, HUMAN IMMUNODEFICIENCY VIRUS
GIGPGQTFYA

SEQ ID NO: 787 - protein, 10 aa, HUMAN IMMUNODEFICIENCY VIRUS
SIGSGQAFYV

SEQ ID NO: 788 - protein, 10 aa, HUMAN IMMUNODEFICIENCY VIRUS
YATGDIIGDI

SEQ ID NO: 789 - protein, 10 aa, HUMAN IMMUNODEFICIENCY VIRUS
GTAGNSSRAA

SEQ ID NO: 790 - protein, 10 aa, HUMAN IMMUNODEFICIENCY VIRUS
MQNGTNITST

SEQ ID NO: 791 - protein, 10 aa, HUMAN IMMUNODEFICIENCY VIRUS
NANITIPCRI

SEQ ID NO: 792 - protein, 10 aa, HUMAN IMMUNODEFICIENCY VIRUS
ITLPCRIKQI

SEQ ID NO: 793 - protein, 10 aa, HUMAN IMMUNODEFICIENCY VIRUS
TLPCRIKQII

SEQ ID NO: 794 - protein, 10 aa, HUMAN IMMUNODEFICIENCY VIRUS
TLPCRIKQIV

SEQ ID NO: 795 - protein, 10 aa, HUMAN IMMUNODEFICIENCY VIRUS
KQIINMWQEV

SEQ ID NO: 796 - protein, 10 aa, HUMAN IMMUNODEFICIENCY VIRUS
NMWQEVGKAM

SEQ ID NO: 797 - protein, 10 aa, HUMAN IMMUNODEFICIENCY VIRUS
WQEVGKAMYA

SEQ ID NO: 798 - protein, 10 aa, HUMAN IMMUNODEFICIENCY VIRUS
WQRVGQAMYA

SEQ ID NO: 799 - protein, 10 aa, HUMAN IMMUNODEFICIENCY VIRUS
GQIRCSSNIT

SEQ ID NO: 800 - protein, 10 aa, HUMAN IMMUNODEFICIENCY VIRUS
EIFRPGGGDM

SEQ ID NO: 801 - protein, 10 aa, HUMAN IMMUNODEFICIENCY VIRUS
ETFRPGGGDM

SEQ ID NO: 802 - protein, 10 aa, HUMAN IMMUNODEFICIENCY VIRUS
DMRDNWRSEL

SEQ ID NO: 803 - protein, 10 aa, HUMAN IMMUNODEFICIENCY VIRUS
ELYKYKVVEI

SEQ ID NO: 804 - protein, 10 aa, HUMAN IMMUNODEFICIENCY VIRUS
ELYKYKVVKI

SEQ ID NO: 805 - protein, 10 aa, HUMAN IMMUNODEFICIENCY VIRUS
KVVKIEPLGV

SEQ ID NO: 806 - protein, 10 aa, HUMAN IMMUNODEFICIENCY VIRUS
VVKIEPLGVA

SEQ ID NO: 807 - protein, 10 aa, HUMAN IMMUNODEFICIENCY VIRUS
KIEPLGVAPT

SEQ ID NO: 808 - protein, 10 aa, HUMAN IMMUNODEFICIENCY VIRUS
VAPTKAKRRV

SEQ ID NO: 809 - protein, 10 aa, HUMAN IMMUNODEFICIENCY VIRUS
STRTHREKRA

SEQ ID NO: 810 - protein, 10 aa, HUMAN IMMUNODEFICIENCY VIRUS
RVVEREKRAV

SEQ ID NO: 811 - protein, 10 aa, HUMAN IMMUNODEFICIENCY VIRUS
RVVQREKRAV

SEQ ID NO: 812 - protein, 10 aa, HUMAN IMMUNODEFICIENCY VIRUS
RAVGIGAVFL

SEQ ID NO: 813 - protein, 10 aa, HUMAN IMMUNODEFICIENCY VIRUS
GIGAVFLGFL

SEQ ID NO: 814 - protein, 10 aa, HUMAN IMMUNODEFICIENCY VIRUS
MLGAMFLGFL

SEQ ID NO: 815 - protein, 10 aa, HUMAN IMMUNODEFICIENCY VIRUS
TIGAMFLGFL

SEQ ID NO: 816 - protein, 10 aa, HUMAN IMMUNODEFICIENCY VIRUS
GALFLGFLGA

SEQ ID NO: 817 - protein, 10 aa, HUMAN IMMUNODEFICIENCY VIRUS
GAMFLGFLGA

SEQ ID NO: 818 - protein, 10 aa, HUMAN IMMUNODEFICIENCY VIRUS
GAVFLGFLGA

SEQ ID NO: 819 - protein, 10 aa, HUMAN IMMUNODEFICIENCY VIRUS
ALFLGFLGAA

SEQ ID NO: 820 - protein, 10 aa, HUMAN IMMUNODEFICIENCY VIRUS
AMFLGFLGAA

SEQ ID NO: 821 - protein, 10 aa, HUMAN IMMUNODEFICIENCY VIRUS
AVFLGFLGAA

SEQ ID NO: 822 - protein, 10 aa, HUMAN IMMUNODEFICIENCY VIRUS
GAAGSTMGAA

SEQ ID NO: 823 - protein, 10 aa, HUMAN IMMUNODEFICIENCY VIRUS
STMGAASITL

SEQ ID NO: 824 - protein, 10 aa, HUMAN IMMUNODEFICIENCY VIRUS
TMGAASITLT

SEQ ID NO: 825 - protein, 10 aa, HUMAN IMMUNODEFICIENCY VIRUS
AASITLTVQA

SEQ ID NO: 826 - protein, 10 aa, HUMAN IMMUNODEFICIENCY VIRUS
ITLTVQARQL

SEQ ID NO: 827 - protein, 10 aa, HUMAN IMMUNODEFICIENCY VIRUS
TLTVQARQLL

SEQ ID NO: 828 - protein, 10 aa, HUMAN IMMUNODEFICIENCY VIRUS
VQARQLLSGI

SEQ ID NO: 829 - protein, 10 aa, HUMAN IMMUNODEFICIENCY VIRUS
QARQLLSGIV

SEQ ID NO: 830 - protein, 10 aa, HUMAN IMMUNODEFICIENCY VIRUS
GIVQQQNNLL

SEQ ID NO: 831 - protein, 10 aa, HUMAN IMMUNODEFICIENCY VIRUS
GIVQQQSNLL

SEQ ID NO: 832 - protein, 10 aa, HUMAN IMMUNODEFICIENCY VIRUS
VQQQNNLLRA

SEQ ID NO: 833 - protein, 10 aa, HUMAN IMMUNODEFICIENCY VIRUS
VQQQSNLLRA

SEQ ID NO: 834 - protein, 10 aa, HUMAN IMMUNODEFICIENCY VIRUS
QQQNNLLRAI

SEQ ID NO: 835 - protein, 10 aa, HUMAN IMMUNODEFICIENCY VIRUS
QQQSNLLRAI

SEQ ID NO: 836 - protein, 10 aa, HUMAN IMMUNODEFICIENCY VIRUS
RAIEAQQHLL

SEQ ID NO: 837 - protein, 10 aa, HUMAN IMMUNODEFICIENCY VIRUS
EAQQHLLKLT

SEQ ID NO: 838 - protein, 10 aa, HUMAN IMMUNODEFICIENCY VIRUS
EAQQHLLQLT

SEQ ID NO: 839 - protein, 10 aa, HUMAN IMMUNODEFICIENCY VIRUS
AQQHLLKLTV

SEQ ID NO: 840 - protein, 10 aa, HUMAN IMMUNODEFICIENCY VIRUS
AQQHLLQLTV

SEQ ID NO: 841 - protein, 10 aa, HUMAN IMMUNODEFICIENCY VIRUS
HLLKLTVWGI

SEQ ID NO: 842 - protein, 10 aa, HUMAN IMMUNODEFICIENCY VIRUS
HLLQLTVWGI

SEQ ID NO: 843 - protein, 10 aa, HUMAN IMMUNODEFICIENCY VIRUS
KLTVWGIKQL

SEQ ID NO: 844 - protein, 10 aa, HUMAN IMMUNODEFICIENCY VIRUS
QLTVWGIKQL

SEQ ID NO: 845 - protein, 10 aa, HUMAN IMMUNODEFICIENCY VIRUS
TVWGIKQLQA

SEQ ID NO: 846 - protein, 10 aa, HUMAN IMMUNODEFICIENCY VIRUS
GIKQLQARVL

SEQ ID NO: 847 - protein, 10 aa, HUMAN IMMUNODEFICIENCY VIRUS
KQLQARVLAV

SEQ ID NO: 848 - protein, 10 aa, HUMAN IMMUNODEFICIENCY VIRUS
YLKDQQLLGI

SEQ ID NO: 849 - protein, 10 aa, HUMAN IMMUNODEFICIENCY VIRUS
YLRDQQLLGI

SEQ ID NO: 850 - protein, 10 aa, HUMAN IMMUNODEFICIENCY VIRUS
GIWGCSGKLI

SEQ ID NO: 851 - protein, 10 aa, HUMAN IMMUNODEFICIENCY VIRUS
MTWMEWEREI

SEQ ID NO: 852 - protein, 10 aa, HUMAN IMMUNODEFICIENCY VIRUS
NQQEKNEQDL

SEQ ID NO: 853 - protein, 10 aa, HUMAN IMMUNODEFICIENCY VIRUS
NQQEKNEQEL

SEQ ID NO: 854 - protein, 10 aa, HUMAN IMMUNODEFICIENCY VIRUS
QQEKNEQDLL

SEQ ID NO: 855 - protein, 10 aa, HUMAN IMMUNODEFICIENCY VIRUS
QQEKNEQELL

SEQ ID NO: 856 - protein, 10 aa, HUMAN IMMUNODEFICIENCY VIRUS
LLALDKWASL

SEQ ID NO: 857 - protein, 10 aa, HUMAN IMMUNODEFICIENCY VIRUS
LLELDKWASL

SEQ ID NO: 858 - protein, 10 aa, HUMAN IMMUNODEFICIENCY VIRUS
WASLWNWFDI

SEQ ID NO: 859 - protein, 10 aa, HUMAN IMMUNODEFICIENCY VIRUS
ITKWLWYIKI

SEQ ID NO: 860 - protein, 10 aa, HUMAN IMMUNODEFICIENCY VIRUS
ITNWLWYIKI

SEQ ID NO: 861 - protein, 10 aa, HUMAN IMMUNODEFICIENCY VIRUS
WLWYIKIFIM

SEQ ID NO: 862 - protein, 10 aa, HUMAN IMMUNODEFICIENCY VIRUS
KIFIMIVGGL

SEQ ID NO: 863 - protein, 10 aa, HUMAN IMMUNODEFICIENCY VIRUS
IMIVGGLIGL

SEQ ID NO: 864 - protein, 10 aa, HUMAN IMMUNODEFICIENCY VIRUS
IVGGLIGLRI

SEQ ID NO: 865 - protein, 10 aa, HUMAN IMMUNODEFICIENCY VIRUS
GLIGLRIIFA

SEQ ID NO: 866 - protein, 10 aa, HUMAN IMMUNODEFICIENCY VIRUS
GLIGLRIVFA

SEQ ID NO: 867 - protein, 10 aa, HUMAN IMMUNODEFICIENCY VIRUS
LIGLRIIFAV

SEQ ID NO: 868 - protein, 10 aa, HUMAN IMMUNODEFICIENCY VIRUS
LIGLRIVFAV

SEQ ID NO: 869 - protein, 10 aa, HUMAN IMMUNODEFICIENCY VIRUS
RIIFAVLSIV

SEQ ID NO: 870 - protein, 10 aa, HUMAN IMMUNODEFICIENCY VIRUS
RIVFAVLSIV

SEQ ID NO: 871 - protein, 10 aa, HUMAN IMMUNODEFICIENCY VIRUS
FAVLSIVNRV

SEQ ID NO: 872 - protein, 10 aa, HUMAN IMMUNODEFICIENCY VIRUS
SIRLVSGFLA

SEQ ID NO: 873 - protein, 10 aa, HUMAN IMMUNODEFICIENCY VIRUS
RLVSGFLALA

SEQ ID NO: 874 - protein, 10 aa, HUMAN IMMUNODEFICIENCY VIRUS
ALAWDDLRSL

SEQ ID NO: 875 - protein, 10 aa, HUMAN IMMUNODEFICIENCY VIRUS
NLCLFSYHRL

SEQ ID NO: 876 - protein, 10 aa, HUMAN IMMUNODEFICIENCY VIRUS
SLCLFSYHRL

SEQ ID NO: 877 - protein, 10 aa, HUMAN IMMUNODEFICIENCY VIRUS
LIAARTVELL

SEQ ID NO: 878 - protein, 10 aa, HUMAN IMMUNODEFICIENCY VIRUS
ELLGRRGWEA

SEQ ID NO: 879 - protein, 10 aa, HUMAN IMMUNODEFICIENCY VIRUS
LLGRRGWEAL

SEQ ID NO: 880 - protein, 10 aa, HUMAN IMMUNODEFICIENCY VIRUS
RLGWEGLKYL

SEQ ID NO: 881 - protein, 10 aa, HUMAN IMMUNODEFICIENCY VIRUS
NLLQYWSQEL

SEQ ID NO: 882 - protein, 10 aa, HUMAN IMMUNODEFICIENCY VIRUS
ELKNSAVSLL

SEQ ID NO: 883 - protein, 10 aa, HUMAN IMMUNODEFICIENCY VIRUS
SAVSLLNATA

SEQ ID NO: 884 - protein, 10 aa, HUMAN IMMUNODEFICIENCY VIRUS
AVSLLNATAI

SEQ ID NO: 885 - protein, 10 aa, HUMAN IMMUNODEFICIENCY VIRUS
SLLNATAIAV

SEQ ID NO: 886 - protein, 10 aa, HUMAN IMMUNODEFICIENCY VIRUS
LLNATAIAVA

SEQ ID NO: 887 - protein, 10 aa, HUMAN IMMUNODEFICIENCY VIRUS
ATAIAVAEGT

SEQ ID NO: 888 - protein, 10 aa, HUMAN IMMUNODEFICIENCY VIRUS
IAVAEGTDRI

SEQ ID NO: 889 - protein, 10 aa, HUMAN IMMUNODEFICIENCY VIRUS
IAVAEGTDRV

SEQ ID NO: 890 - protein, 10 aa, HUMAN IMMUNODEFICIENCY VIRUS
AVAEGTDRII

SEQ ID NO: 891 - protein, 10 aa, HUMAN IMMUNODEFICIENCY VIRUS
AVAEGTDRVI

SEQ ID NO: 892 - protein, 10 aa, HUMAN IMMUNODEFICIENCY VIRUS
RAILHIPRRI

SEQ ID NO: 893 - protein, 10 aa, HUMAN IMMUNODEFICIENCY VIRUS
HIPRRIRQGL

SEQ ID NO: 894 - protein, 10 aa, HUMAN IMMUNODEFICIENCY VIRUS
NIPRRIRQGL

SEQ ID NO: 895 - protein, 10 aa, HUMAN IMMUNODEFICIENCY VIRUS
RIRQGLERAL

SEQ ID NO: 896 - protein, 11 aa, HUMAN IMMUNODEFICIENCY VIRUS
LILGLVIICSA

SEQ ID NO: 897 - protein, 11 aa, HUMAN IMMUNODEFICIENCY VIRUS
KQLYATVYSGV

SEQ ID NO: 898 - protein, 11 aa, HUMAN IMMUNODEFICIENCY VIRUS
GVPVWKEATTT

SEQ ID NO: 899 - protein, 11 aa, HUMAN IMMUNODEFICIENCY VIRUS
ATTTLFCASDA

SEQ ID NO: 900 - protein, 11 aa, HUMAN IMMUNODEFICIENCY VIRUS
TTLFCASDAKA

SEQ ID NO: 901 - protein, 11 aa, HUMAN IMMUNODEFICIENCY VIRUS
NVWATHACVPT

SEQ ID NO: 902 - protein, 11 aa, HUMAN IMMUNODEFICIENCY VIRUS
CVPTDPNPQEI

SEQ ID NO: 903 - protein, 11 aa, HUMAN IMMUNODEFICIENCY VIRUS
CVPTDPNPQEV

SEQ ID NO: 904 - protein, 11 aa, HUMAN IMMUNODEFICIENCY VIRUS
PTDPNPQEVVL

SEQ ID NO: 905 - protein, 11 aa, HUMAN IMMUNODEFICIENCY VIRUS
NMWKNNMVEQM

SEQ ID NO: 906 - protein, 11 aa, HUMAN IMMUNODEFICIENCY VIRUS
NMVEQMHEDII

SEQ ID NO: 907 - protein, 11 aa, HUMAN IMMUNODEFICIENCY VIRUS
SLWDQSLKPCV

SEQ ID NO: 908 - protein, 11 aa, HUMAN IMMUNODEFICIENCY VIRUS
DQSLKPCVKLT

SEQ ID NO: 909 - protein, 11 aa, HUMAN IMMUNODEFICIENCY VIRUS
SLKPCVKLTPL

SEQ ID NO: 910 - protein, 11 aa, HUMAN IMMUNODEFICIENCY VIRUS
CVKLTPLCVTL

SEQ ID NO: 911 - protein, 11 aa, HUMAN IMMUNODEFICIENCY VIRUS
LTPLCVTLNCT

SEQ ID NO: 912 - protein, 11 aa, HUMAN IMMUNODEFICIENCY VIRUS
EIKNCSFNITT

SEQ ID NO: 913 - protein, 11 aa, HUMAN IMMUNODEFICIENCY VIRUS
RLINCNTSAIT

SEQ ID NO: 914 - protein, 11 aa, HUMAN IMMUNODEFICIENCY VIRUS
QACPKVSFEPI

SEQ ID NO: 915 - protein, 11 aa, HUMAN IMMUNODEFICIENCY VIRUS
PIHYCAPAGFA

SEQ ID NO: 916 - protein, 11 aa, HUMAN IMMUNODEFICIENCY VIRUS
PIHYCTPAGFA

SEQ ID NO: 917 - protein, 11 aa, HUMAN IMMUNODEFICIENCY VIRUS
GTGPCKNVSTV

SEQ ID NO: 918 - protein, 11 aa, HUMAN IMMUNODEFICIENCY VIRUS
NVSTVQCTHGI

SEQ ID NO: 919 - protein, 11 aa, HUMAN IMMUNODEFICIENCY VIRUS
TVQCTHGIKPV

SEQ ID NO: 920 - protein, 11 aa, HUMAN IMMUNODEFICIENCY VIRUS
TVQCTHGIRPV

SEQ ID NO: 921 - protein, 11 aa, HUMAN IMMUNODEFICIENCY VIRUS
VQCTHGIKPVV

SEQ ID NO: 922 - protein, 11 aa, HUMAN IMMUNODEFICIENCY VIRUS
VQCTHGIRPVV

SEQ ID NO: 923 - protein, 11 aa, HUMAN IMMUNODEFICIENCY VIRUS
CTHGIKPVVST

SEQ ID NO: 924 - protein, 11 aa, HUMAN IMMUNODEFICIENCY VIRUS
CTHGIRPVVST

SEQ ID NO: 925 - protein, 11 aa, HUMAN IMMUNODEFICIENCY VIRUS
GIKPVVSTQLL

SEQ ID NO: 926 - protein, 11 aa, HUMAN IMMUNODEFICIENCY VIRUS
GIRPVVSTQLL

SEQ ID NO: 927 - protein, 11 aa, HUMAN IMMUNODEFICIENCY VIRUS
STQLLLNGSLA

SEQ ID NO: 928 - protein, 11 aa, HUMAN IMMUNODEFICIENCY VIRUS
LLNGSLAEEEV

SEQ ID NO: 929 - protein, 11 aa, HUMAN IMMUNODEFICIENCY VIRUS
EINCTRPNNNT

SEQ ID NO: 930 - protein, 11 aa, HUMAN IMMUNODEFICIENCY VIRUS
RIGPGQTFYAT

SEQ ID NO: 931 - protein, 11 aa, HUMAN IMMUNODEFICIENCY VIRUS
GIGPGQTFYAT

SEQ ID NO: 932 - protein, 11 aa, HUMAN IMMUNODEFICIENCY VIRUS
SIGSGQAFYVT

SEQ ID NO: 933 - protein, 11 aa, HUMAN IMMUNODEFICIENCY VIRUS
EMHTNYTSNDT

SEQ ID NO: 934 - protein, 11 aa, HUMAN IMMUNODEFICIENCY VIRUS
NITLPCRIKQI

SEQ ID NO: 935 - protein, 11 aa, HUMAN IMMUNODEFICIENCY VIRUS
TITLPCRIKQI

SEQ ID NO: 936 - protein, 11 aa, HUMAN IMMUNODEFICIENCY VIRUS
ITLPCRIKQII

SEQ ID NO: 937 - protein, 11 aa, HUMAN IMMUNODEFICIENCY VIRUS
IINMWQEVGKA

SEQ ID NO: 938 - protein, 11 aa, HUMAN IMMUNODEFICIENCY VIRUS
EVGKAMYAPPI

SEQ ID NO: 939 - protein, 11 aa, HUMAN IMMUNODEFICIENCY VIRUS
RVGQAMYAPPI

SEQ ID NO: 940 - protein, 11 aa, HUMAN IMMUNODEFICIENCY VIRUS
QIRCSSNITGL

SEQ ID NO: 941 - protein, 11 aa, HUMAN IMMUNODEFICIENCY VIRUS
KVVKIEPLGVA

SEQ ID NO: 942 - protein, 11 aa, HUMAN IMMUNODEFICIENCY VIRUS
GVAPTKAKRRV

SEQ ID NO: 943 - protein, 11 aa, HUMAN IMMUNODEFICIENCY VIRUS
VAPTKAKRRVV

SEQ ID NO: 944 - protein, 11 aa, HUMAN IMMUNODEFICIENCY VIRUS
NIHTPHREKRA

SEQ ID NO: 945 - protein, 11 aa, HUMAN IMMUNODEFICIENCY VIRUS
STRTHREKRAV

SEQ ID NO: 946 - protein, 11 aa, HUMAN IMMUNODEFICIENCY VIRUS
VVEREKRAVGI

SEQ ID NO: 947 - protein, 11 aa, HUMAN IMMUNODEFICIENCY VIRUS
GALFLGFLGAA

SEQ ID NO: 948 - protein, 11 aa, HUMAN IMMUNODEFICIENCY VIRUS
GAMFLGFLGAA

SEQ ID NO: 949 - protein, 11 aa, HUMAN IMMUNODEFICIENCY VIRUS
GAVFLGFLGAA

SEQ ID NO: 950 - protein, 11 aa, HUMAN IMMUNODEFICIENCY VIRUS
FLGFLGAAGST

SEQ ID NO: 951 - protein, 11 aa, HUMAN IMMUNODEFICIENCY VIRUS
FLGAAGSTMGA

SEQ ID NO: 952 - protein, 11 aa, HUMAN IMMUNODEFICIENCY VIRUS
AAGSTMGAASI

SEQ ID NO: 953 - protein, 11 aa, HUMAN IMMUNODEFICIENCY VIRUS
STMGAASITLT

SEQ ID NO: 954 - protein, 11 aa, HUMAN IMMUNODEFICIENCY VIRUS
TMGAASITLTV

SEQ ID NO: 955 - protein, 11 aa, HUMAN IMMUNODEFICIENCY VIRUS
GAASITLTVQA

SEQ ID NO: 956 - protein, 11 aa, HUMAN IMMUNODEFICIENCY VIRUS
SITLTVQARQL

SEQ ID NO: 957 - protein, 11 aa, HUMAN IMMUNODEFICIENCY VIRUS
ITLTVQARQLL

SEQ ID NO: 958 - protein, 11 aa, HUMAN IMMUNODEFICIENCY VIRUS
TVQARQLLSGI

SEQ ID NO: 959 - protein, 11 aa, HUMAN IMMUNODEFICIENCY VIRUS
VQARQLLSGIV

SEQ ID NO: 960 - protein, 11 aa, HUMAN IMMUNODEFICIENCY VIRUS
IVQQQNNLLRA

SEQ ID NO: 961 - protein, 11 aa, HUMAN IMMUNODEFICIENCY VIRUS
IVQQQSNLLRA

SEQ ID NO: 962 - protein, 11 aa, HUMAN IMMUNODEFICIENCY VIRUS
VQQQNNLLRAI

SEQ ID NO: 963 - protein, 11 aa, HUMAN IMMUNODEFICIENCY VIRUS
VQQQSNLLRAI

SEQ ID NO: 964 - protein, 11 aa, HUMAN IMMUNODEFICIENCY VIRUS
QQNNLLRAIEA

SEQ ID NO: 965 - protein, 11 aa, HUMAN IMMUNODEFICIENCY VIRUS
QQSNLLRAIEA

SEQ ID NO: 966 - protein, 11 aa, HUMAN IMMUNODEFICIENCY VIRUS
LLRAIEAQQHL

SEQ ID NO: 967 - protein, 11 aa, HUMAN IMMUNODEFICIENCY VIRUS
AIEAQQHLLKL

SEQ ID NO: 968 - protein, 11 aa, HUMAN IMMUNODEFICIENCY VIRUS
AIEAQQHLLQL

SEQ ID NO: 969 - protein, 11 aa, HUMAN IMMUNODEFICIENCY VIRUS
EAQQHLLKLTV

SEQ ID NO: 970 - protein, 11 aa, HUMAN IMMUNODEFICIENCY VIRUS
EAQQHLLQLTV

SEQ ID NO: 971 - protein, 11 aa, HUMAN IMMUNODEFICIENCY VIRUS
LQLTVWGIKQL

SEQ ID NO: 972 - protein, 11 aa, HUMAN IMMUNODEFICIENCY VIRUS
LTVWGIKQLQA

SEQ ID NO: 973 - protein, 11 aa, HUMAN IMMUNODEFICIENCY VIRUS
GIKQLQARVLA

SEQ ID NO: 974 - protein, 11 aa, HUMAN IMMUNODEFICIENCY VIRUS
QARVLAVERYL

SEQ ID NO: 975 - protein, 11 aa, HUMAN IMMUNODEFICIENCY VIRUS
AVERYLKDQQL

SEQ ID NO: 976 - protein, 11 aa, HUMAN IMMUNODEFICIENCY VIRUS
AVERYLRDQQL

SEQ ID NO: 977 - protein, 11 aa, HUMAN IMMUNODEFICIENCY VIRUS
LLGIWGCSGKL

SEQ ID NO: 978 - protein, 11 aa, HUMAN IMMUNODEFICIENCY VIRUS
NMTWMEWEREI

SEQ ID NO: 979 - protein, 11 aa, HUMAN IMMUNODEFICIENCY VIRUS
NQQEKNEQDLL

SEQ ID NO: 980 - protein, 11 aa, HUMAN IMMUNODEFICIENCY VIRUS
NQQEKNEQELL

SEQ ID NO: 981 - protein, 11 aa, HUMAN IMMUNODEFICIENCY VIRUS
QQEKNEQDLLA

SEQ ID NO: 982 - protein, 11 aa, HUMAN IMMUNODEFICIENCY VIRUS
EQDLLALDKWA

SEQ ID NO: 983 - protein, 11 aa, HUMAN IMMUNODEFICIENCY VIRUS
EQELLELDKWA

SEQ ID NO: 984 - protein, 11 aa, HUMAN IMMUNODEFICIENCY VIRUS
ELLELDKWASL

SEQ ID NO: 985 - protein, 11 aa, HUMAN IMMUNODEFICIENCY VIRUS
WASLWNWFDIT

SEQ ID NO: 986 - protein, 11 aa, HUMAN IMMUNODEFICIENCY VIRUS
WLWYIKIFIMI

SEQ ID NO: 987 - protein, 11 aa, HUMAN IMMUNODEFICIENCY VIRUS
KIFIMIVGGLI

SEQ ID NO: 988 - protein, 11 aa, HUMAN IMMUNODEFICIENCY VIRUS
FIMIVGGLIGL

SEQ ID NO: 989 - protein, 11 aa, HUMAN IMMUNODEFICIENCY VIRUS
MIVGGLIGLRI

SEQ ID NO: 990 - protein, 11 aa, HUMAN IMMUNODEFICIENCY VIRUS
IVGGLIGLRII

SEQ ID NO: 991 - protein, 11 aa, HUMAN IMMUNODEFICIENCY VIRUS
IVGGLIGLRIV

SEQ ID NO: 992 - protein, 11 aa, HUMAN IMMUNODEFICIENCY VIRUS
GLIGLRIIFAV

SEQ ID NO: 993 - protein, 11 aa, HUMAN IMMUNODEFICIENCY VIRUS
GLIGLRIVFAV

SEQ ID NO: 994 - protein, 11 aa, HUMAN IMMUNODEFICIENCY VIRUS
LIGLRIIFAVL

SEQ ID NO: 995 - protein, 11 aa, HUMAN IMMUNODEFICIENCY VIRUS
LIGLRIVFAVL

SEQ ID NO: 996 - protein, 11 aa, HUMAN IMMUNODEFICIENCY VIRUS
GLRIIFAVLSI

SEQ ID NO: 997 - protein, 11 aa, HUMAN IMMUNODEFICIENCY VIRUS
GLRIVFAVLSI

SEQ ID NO: 998 - protein, 11 aa, HUMAN IMMUNODEFICIENCY VIRUS
RQGYSPLSFQT

SEQ ID NO: 999 - protein, 11 aa, HUMAN IMMUNODEFICIENCY VIRUS
SIRLVSGFLAL

SEQ ID NO: 1000 - protein, 11 aa, HUMAN IMMUNODEFICIENCY VIRUS
LALAWDDLRSL

SEQ ID NO: 1001 - protein, 11 aa, HUMAN IMMUNODEFICIENCY VIRUS
LAWDDLRSLCL

SEQ ID NO: 1002 - protein, 11 aa, HUMAN IMMUNODEFICIENCY VIRUS
CLFSYHRLRDL

SEQ ID NO: 1003 - protein, 11 aa, HUMAN IMMUNODEFICIENCY VIRUS
ELLGRRGWEAL

SEQ ID NO: 1004 - protein, 11 aa, HUMAN IMMUNODEFICIENCY VIRUS
SQELKNSAVSL

SEQ ID NO: 1005 - protein, 11 aa, HUMAN IMMUNODEFICIENCY VIRUS
SAVSLLNATAI

SEQ ID NO: 1006 - protein, 11 aa, HUMAN IMMUNODEFICIENCY VIRUS
AVSLLNATAIA

SEQ ID NO: 1007 - protein, 11 aa, HUMAN IMMUNODEFICIENCY VIRUS
SLLNATAIAVA

SEQ ID NO: 1008 - protein, 11 aa, HUMAN IMMUNODEFICIENCY VIRUS
NATAIAVAEGT

SEQ ID NO: 1009 - protein, 11 aa, HUMAN IMMUNODEFICIENCY VIRUS
AIAVAEGTDRI

SEQ ID NO: 1010 - protein, 11 aa, HUMAN IMMUNODEFICIENCY VIRUS
AIAVAEGTDRV

SEQ ID NO: 1011 - protein, 11 aa, HUMAN IMMUNODEFICIENCY VIRUS
IAVAEGTDRII

SEQ ID NO: 1012 - protein, 11 aa, HUMAN IMMUNODEFICIENCY VIRUS
IAVAEGTDRVI

SEQ ID NO: 1013 - protein, 11 aa, HUMAN IMMUNODEFICIENCY VIRUS
PTRIRQGLERA

SEQ ID NO: 1014 - protein, 11 aa, HUMAN IMMUNODEFICIENCY VIRUS
RIRQGLERALL

SEQ ID NO: 1015 - protein, 8 aa, HUMAN IMMUNODEFICIENCY VIRUS
SVLSGGEL

SEQ ID NO: 1016 - protein, 8 aa, HUMAN IMMUNODEFICIENCY VIRUS
SVLSGGKL

SEQ ID NO: 1017 - protein, 8 aa, HUMAN IMMUNODEFICIENCY VIRUS
KLDAWEKI

SEQ ID NO: 1018 - protein, 8 aa, HUMAN IMMUNODEFICIENCY VIRUS
KLDKWEKI

SEQ ID NO: 1019 - protein, 8 aa, HUMAN IMMUNODEFICIENCY VIRUS
DAWEKIRL

SEQ ID NO: 1020 - protein, 8 aa, HUMAN IMMUNODEFICIENCY VIRUS
KLKHIVWA

SEQ ID NO: 1021 - protein, 8 aa, HUMAN IMMUNODEFICIENCY VIRUS
RLKHLVWA

SEQ ID NO: 1022 - protein, 8 aa, HUMAN IMMUNODEFICIENCY VIRUS
IVWASREL

SEQ ID NO: 1023 - protein, 8 aa, HUMAN IMMUNODEFICIENCY VIRUS
LVWASREL

SEQ ID NO: 1024 - protein, 8 aa, HUMAN IMMUNODEFICIENCY VIRUS
FALNPGLL

SEQ ID NO: 1025 - protein, 8 aa, HUMAN IMMUNODEFICIENCY VIRUS
FAVNPGLL

SEQ ID NO: 1026 - protein, 8 aa, HUMAN IMMUNODEFICIENCY VIRUS
QLQPALQT

SEQ ID NO: 1027 - protein, 8 aa, HUMAN IMMUNODEFICIENCY VIRUS
QLQPSLQT

SEQ ID NO: 1028 - protein, 8 aa, HUMAN IMMUNODEFICIENCY VIRUS
LQTGSEEL

SEQ ID NO: 1029 - protein, 8 aa, HUMAN IMMUNODEFICIENCY VIRUS
GTEELRSL

SEQ ID NO: 1030 - protein, 8 aa, HUMAN IMMUNODEFICIENCY VIRUS
ELRSLYNT

SEQ ID NO: 1031 - protein, 8 aa, HUMAN IMMUNODEFICIENCY VIRUS
SLFNTVAT

SEQ ID NO: 1032 - protein, 8 aa, HUMAN IMMUNODEFICIENCY VIRUS
SLYNTVAT

SEQ ID NO: 1033 - protein, 8 aa, HUMAN IMMUNODEFICIENCY VIRUS
TVATLYCV

SEQ ID NO: 1034 - protein, 8 aa, HUMAN IMMUNODEFICIENCY VIRUS
DVKDTKEA

SEQ ID NO: 1035 - protein, 8 aa, HUMAN IMMUNODEFICIENCY VIRUS
EVKDTKEA

SEQ ID NO: 1036 - protein, 8 aa, HUMAN IMMUNODEFICIENCY VIRUS
AQQAAADT

SEQ ID NO: 1037 - protein, 8 aa, HUMAN IMMUNODEFICIENCY VIRUS
AQQAAAAT

SEQ ID NO: 1038 - protein, 8 aa, HUMAN IMMUNODEFICIENCY VIRUS
KVSQNYPI

SEQ ID NO: 1039 - protein, 8 aa, HUMAN IMMUNODEFICIENCY VIRUS
QVSQNYPI

SEQ ID NO: 1040 - protein, 8 aa, HUMAN IMMUNODEFICIENCY VIRUS
VQNAQGQM

SEQ ID NO: 1041 - protein, 8 aa, HUMAN IMMUNODEFICIENCY VIRUS
VQNLQGQM

SEQ ID NO: 1042 - protein, 8 aa, HUMAN IMMUNODEFICIENCY VIRUS
GQMVHQAI

SEQ ID NO: 1043 - protein, 8 aa, HUMAN IMMUNODEFICIENCY VIRUS
HQAISPRT

SEQ ID NO: 1044 - protein, 8 aa, HUMAN IMMUNODEFICIENCY VIRUS
HQALSPRT

SEQ ID NO: 1045 - protein, 8 aa, HUMAN IMMUNODEFICIENCY VIRUS
QAISPRTL

SEQ ID NO: 1046 - protein, 8 aa, HUMAN IMMUNODEFICIENCY VIRUS
QALSPRTL

SEQ ID NO: 1047 - protein, 8 aa, HUMAN IMMUNODEFICIENCY VIRUS
TLNAWVKV

SEQ ID NO: 1048 - protein, 8 aa, HUMAN IMMUNODEFICIENCY VIRUS
KAFSPEVI

SEQ ID NO: 1049 - protein, 8 aa, HUMAN IMMUNODEFICIENCY VIRUS
EVIPMFSA

SEQ ID NO: 1050 - protein, 8 aa, HUMAN IMMUNODEFICIENCY VIRUS
EVIPMFTA

SEQ ID NO: 1051 - protein, 8 aa, HUMAN IMMUNODEFICIENCY VIRUS
VIPMFSAL

SEQ ID NO: 1052 - protein, 8 aa, HUMAN IMMUNODEFICIENCY VIRUS
VIPMFTAL

SEQ ID NO: 1053 - protein, 8 aa, HUMAN IMMUNODEFICIENCY VIRUS
FTALSEGA

SEQ ID NO: 1054 - protein, 8 aa, HUMAN IMMUNODEFICIENCY VIRUS
SALSEGAT

SEQ ID NO: 1055 - protein, 8 aa, HUMAN IMMUNODEFICIENCY VIRUS
TALSEGAT

SEQ ID NO: 1056 - protein, 8 aa, HUMAN IMMUNODEFICIENCY VIRUS
ATPQDLNM

SEQ ID NO: 1057 - protein, 8 aa, HUMAN IMMUNODEFICIENCY VIRUS
ATPQDLNT

SEQ ID NO: 1058 - protein, 8 aa, HUMAN IMMUNODEFICIENCY VIRUS
PQDLNMML

SEQ ID NO: 1059 - protein, 8 aa, HUMAN IMMUNODEFICIENCY VIRUS
PQDLNTML

SEQ ID NO: 1060 - protein, 8 aa, HUMAN IMMUNODEFICIENCY VIRUS
DLNMMLNI

SEQ ID NO: 1061 - protein, 8 aa, HUMAN IMMUNODEFICIENCY VIRUS
DLNTMLNT

SEQ ID NO: 1062 - protein, 8 aa, HUMAN IMMUNODEFICIENCY VIRUS
NIVGGHQA

SEQ ID NO: 1063 - protein, 8 aa, HUMAN IMMUNODEFICIENCY VIRUS
NTVGGHQA

SEQ ID NO: 1064 - protein, 8 aa, HUMAN IMMUNODEFICIENCY VIRUS
IVGGHQAA

SEQ ID NO: 1065 - protein, 8 aa, HUMAN IMMUNODEFICIENCY VIRUS
TVGGHQAA

SEQ ID NO: 1066 - protein, 8 aa, HUMAN IMMUNODEFICIENCY VIRUS
HQAAMQML

SEQ ID NO: 1067 - protein, 8 aa, HUMAN IMMUNODEFICIENCY VIRUS
AMQMLKDT

SEQ ID NO: 1068 - protein, 8 aa, HUMAN IMMUNODEFICIENCY VIRUS
AMQMLKET

SEQ ID NO: 1069 - protein, 8 aa, HUMAN IMMUNODEFICIENCY VIRUS
MQMLKDTI

SEQ ID NO: 1070 - protein, 8 aa, HUMAN IMMUNODEFICIENCY VIRUS
MQMLKETI

SEQ ID NO: 1071 - protein, 8 aa, HUMAN IMMUNODEFICIENCY VIRUS
DTINEEAA

SEQ ID NO: 1072 - protein, 8 aa, HUMAN IMMUNODEFICIENCY VIRUS
ETINEEAA

SEQ ID NO: 1073 - protein, 8 aa, HUMAN IMMUNODEFICIENCY VIRUS
EAAEWDRL

SEQ ID NO: 1074 - protein, 8 aa, HUMAN IMMUNODEFICIENCY VIRUS
EAAEWDRV

SEQ ID NO: 1075 - protein, 8 aa, HUMAN IMMUNODEFICIENCY VIRUS
PVHAGPIA

SEQ ID NO: 1076 - protein, 8 aa, HUMAN IMMUNODEFICIENCY VIRUS
DIAGTTST

SEQ ID NO: 1077 - protein, 8 aa, HUMAN IMMUNODEFICIENCY VIRUS
IAGTTSTL

SEQ ID NO: 1078 - protein, 8 aa, HUMAN IMMUNODEFICIENCY VIRUS
STLQEQIA

SEQ ID NO: 1079 - protein, 8 aa, HUMAN IMMUNODEFICIENCY VIRUS
LQEQIAWM

SEQ ID NO: 1080 - protein, 8 aa, HUMAN IMMUNODEFICIENCY VIRUS
LQEQIGWM

SEQ ID NO: 1081 - protein, 8 aa, HUMAN IMMUNODEFICIENCY VIRUS
WMTNNPPI

SEQ ID NO: 1082 - protein, 8 aa, HUMAN IMMUNODEFICIENCY VIRUS
WMTSNPPI

SEQ ID NO: 1083 - protein, 8 aa, HUMAN IMMUNODEFICIENCY VIRUS
DIYKRWII

SEQ ID NO: 1084 - protein, 8 aa, HUMAN IMMUNODEFICIENCY VIRUS
EIYKRWII

SEQ ID NO: 1085 - protein, 8 aa, HUMAN IMMUNODEFICIENCY VIRUS
IILGLNKI

SEQ ID NO: 1086 - protein, 8 aa, HUMAN IMMUNODEFICIENCY VIRUS
ILGLNKIV

SEQ ID NO: 1087 - protein, 8 aa, HUMAN IMMUNODEFICIENCY VIRUS
GLNKIVRM

SEQ ID NO: 1088 - protein, 8 aa, HUMAN IMMUNODEFICIENCY VIRUS
IVRMYSPT

SEQ ID NO: 1089 - protein, 8 aa, HUMAN IMMUNODEFICIENCY VIRUS
IVRMYSPV

SEQ ID NO: 1090 - protein, 8 aa, HUMAN IMMUNODEFICIENCY VIRUS
RMYSPTSI

SEQ ID NO: 1091 - protein, 8 aa, HUMAN IMMUNODEFICIENCY VIRUS
RMYSPVSI

SEQ ID NO: 1092 - protein, 8 aa, HUMAN IMMUNODEFICIENCY VIRUS
YVDRFFKT

SEQ ID NO: 1093 - protein, 8 aa, HUMAN IMMUNODEFICIENCY VIRUS
YVDRFYKT

SEQ ID NO: 1094 - protein, 8 aa, HUMAN IMMUNODEFICIENCY VIRUS
KTLRAEQA

SEQ ID NO: 1095 - protein, 8 aa, HUMAN IMMUNODEFICIENCY VIRUS
TLRAEQAT

SEQ ID NO: 1096 - protein, 8 aa, HUMAN IMMUNODEFICIENCY VIRUS
SQEVKNWM

SEQ ID NO: 1097 - protein, 8 aa, HUMAN IMMUNODEFICIENCY VIRUS
TQDVKNWM

SEQ ID NO: 1098 - protein, 8 aa, HUMAN IMMUNODEFICIENCY VIRUS
TQEVKNWM

SEQ ID NO: 1099 - protein, 8 aa, HUMAN IMMUNODEFICIENCY VIRUS
WMTDTLLV

SEQ ID NO: 1100 - protein, 8 aa, HUMAN IMMUNODEFICIENCY VIRUS
WMTETLLV

SEQ ID NO: 1101 - protein, 8 aa, HUMAN IMMUNODEFICIENCY VIRUS
DTLLVQNA

SEQ ID NO: 1102 - protein, 8 aa, HUMAN IMMUNODEFICIENCY VIRUS
ETLLVQNA

SEQ ID NO: 1103 - protein, 8 aa, HUMAN IMMUNODEFICIENCY VIRUS
NANPDCKT

SEQ ID NO: 1104 - protein, 8 aa, HUMAN IMMUNODEFICIENCY VIRUS
ILKALGPA

SEQ ID NO: 1105 - protein, 8 aa, HUMAN IMMUNODEFICIENCY VIRUS
KALGPAAT

SEQ ID NO: 1106 - protein, 8 aa, HUMAN IMMUNODEFICIENCY VIRUS
ALGPAATL

SEQ ID NO: 1107 - protein, 8 aa, HUMAN IMMUNODEFICIENCY VIRUS
ALGPGATL

SEQ ID NO: 1108 - protein, 8 aa, HUMAN IMMUNODEFICIENCY VIRUS
PAATLEEM

SEQ ID NO: 1109 - protein, 8 aa, HUMAN IMMUNODEFICIENCY VIRUS
AATLEEMM

SEQ ID NO: 1110 - protein, 8 aa, HUMAN IMMUNODEFICIENCY VIRUS
GASLEEMM

SEQ ID NO: 1111 - protein, 8 aa, HUMAN IMMUNODEFICIENCY VIRUS
GATLEEMM

SEQ ID NO: 1112 - protein, 8 aa, HUMAN IMMUNODEFICIENCY VIRUS
ATLEEMMT

SEQ ID NO: 1113 - protein, 8 aa, HUMAN IMMUNODEFICIENCY VIRUS
SLEEMMTA

SEQ ID NO: 1114 - protein, 8 aa, HUMAN IMMUNODEFICIENCY VIRUS
TLEEMMTA

SEQ ID NO: 1115 - protein, 8 aa, HUMAN IMMUNODEFICIENCY VIRUS
MMTACQGV

SEQ ID NO: 1116 - protein, 8 aa, HUMAN IMMUNODEFICIENCY VIRUS
KARVLAEA

SEQ ID NO: 1117 - protein, 8 aa, HUMAN IMMUNODEFICIENCY VIRUS
LAEAMSQA

SEQ ID NO: 1118 - protein, 8 aa, HUMAN IMMUNODEFICIENCY VIRUS
LAEAMSQV

SEQ ID NO: 1119 - protein, 8 aa, HUMAN IMMUNODEFICIENCY VIRUS
SQVTNSAT

SEQ ID NO: 1120 - protein, 8 aa, HUMAN IMMUNODEFICIENCY VIRUS
HIAKNCRA

SEQ ID NO: 1121 - protein, 8 aa, HUMAN IMMUNODEFICIENCY VIRUS
HIARNCRA

SEQ ID NO: 1122 - protein, 8 aa, HUMAN IMMUNODEFICIENCY VIRUS
HLARNCRA

SEQ ID NO: 1123 - protein, 8 aa, HUMAN IMMUNODEFICIENCY VIRUS
QANFLGKI

SEQ ID NO: 1124 - protein, 8 aa, HUMAN IMMUNODEFICIENCY VIRUS
GTRPGNYV

SEQ ID NO: 1125 - protein, 8 aa, HUMAN IMMUNODEFICIENCY VIRUS
LQNRPEPT

SEQ ID NO: 1126 - protein, 8 aa, HUMAN IMMUNODEFICIENCY VIRUS
LQSRPEPT

SEQ ID NO: 1127 - protein, 8 aa, HUMAN IMMUNODEFICIENCY VIRUS
ELYPLASL

SEQ ID NO: 1128 - protein, 8 aa, HUMAN IMMUNODEFICIENCY VIRUS
ELYPLTSL

SEQ ID NO: 1129 - protein, 8 aa, HUMAN IMMUNODEFICIENCY VIRUS
PLASLKSL

SEQ ID NO: 1130 - protein, 8 aa, HUMAN IMMUNODEFICIENCY VIRUS
PLTSLKSL

SEQ ID NO: 1131 - protein, 8 aa, HUMAN IMMUNODEFICIENCY VIRUS
PLTSLRSL

SEQ ID NO: 1132 - protein, 8 aa, HUMAN IMMUNODEFICIENCY VIRUS
SLFGNDPL

SEQ ID NO: 1133 - protein, 8 aa, HUMAN IMMUNODEFICIENCY VIRUS
SLFGSDPL

SEQ ID NO: 1134 - protein, 9 aa, HUMAN IMMUNODEFICIENCY VIRUS
VLSGGKLDA

SEQ ID NO: 1135 - protein, 9 aa, HUMAN IMMUNODEFICIENCY VIRUS
HIVWASREL

SEQ ID NO: 1136 - protein, 9 aa, HUMAN IMMUNODEFICIENCY VIRUS
HLVWASREL

SEQ ID NO: 1137 - protein, 9 aa, HUMAN IMMUNODEFICIENCY VIRUS
ALNPGLLET

SEQ ID NO: 1138 - protein, 9 aa, HUMAN IMMUNODEFICIENCY VIRUS
AVNPGLLET

SEQ ID NO: 1139 - protein, 9 aa, HUMAN IMMUNODEFICIENCY VIRUS
ETSEGCRQI

SEQ ID NO: 1140 - protein, 9 aa, HUMAN IMMUNODEFICIENCY VIRUS
ILGQLQPSL

SEQ ID NO: 1141 - protein, 9 aa, HUMAN IMMUNODEFICIENCY VIRUS
GQLQPSLQT

SEQ ID NO: 1142 - protein, 9 aa, HUMAN IMMUNODEFICIENCY VIRUS
LQPALQTGT

SEQ ID NO: 1143 - protein, 9 aa, HUMAN IMMUNODEFICIENCY VIRUS
SLQTGSEEL

SEQ ID NO: 1144 - protein, 9 aa, HUMAN IMMUNODEFICIENCY VIRUS
ELRSLYNTV

SEQ ID NO: 1145 - protein, 9 aa, HUMAN IMMUNODEFICIENCY VIRUS
SLFNTVATL

SEQ ID NO: 1146 - protein, 9 aa, HUMAN IMMUNODEFICIENCY VIRUS
SLYNTVATL

SEQ ID NO: 1147 - protein, 9 aa, HUMAN IMMUNODEFICIENCY VIRUS
NTVATLYCV

SEQ ID NO: 1148 - protein, 9 aa, HUMAN IMMUNODEFICIENCY VIRUS
TLYCVHQKI

SEQ ID NO: 1149 - protein, 9 aa, HUMAN IMMUNODEFICIENCY VIRUS
TLYCVHQRI

SEQ ID NO: 1150 - protein, 9 aa, HUMAN IMMUNODEFICIENCY VIRUS
HQRIEVKDT

SEQ ID NO: 1151 - protein, 9 aa, HUMAN IMMUNODEFICIENCY VIRUS
DVKDTKEAL

SEQ ID NO: 1152 - protein, 9 aa, HUMAN IMMUNODEFICIENCY VIRUS
EVKDTKEAL

SEQ ID NO: 1153 - protein, 9 aa, HUMAN IMMUNODEFICIENCY VIRUS
DTKEALDKI

SEQ ID NO: 1154 - protein, 9 aa, HUMAN IMMUNODEFICIENCY VIRUS
DTKEALEKI

SEQ ID NO: 1155 - protein, 9 aa, HUMAN IMMUNODEFICIENCY VIRUS
EQNKSKKKA

SEQ ID NO: 1156 - protein, 9 aa, HUMAN IMMUNODEFICIENCY VIRUS
KAQQAAADT

SEQ ID NO: 1157 - protein, 9 aa, HUMAN IMMUNODEFICIENCY VIRUS
SQVSQNYPI

SEQ ID NO: 1158 - protein, 9 aa, HUMAN IMMUNODEFICIENCY VIRUS
KVSQNYPIV

SEQ ID NO: 1159 - protein, 9 aa, HUMAN IMMUNODEFICIENCY VIRUS
QVSQNYPIV

SEQ ID NO: 1160 - protein, 9 aa, HUMAN IMMUNODEFICIENCY VIRUS
IVQNAQGQM

SEQ ID NO: 1161 - protein, 9 aa, HUMAN IMMUNODEFICIENCY VIRUS
IVQNLQGQM

SEQ ID NO: 1162 - protein, 9 aa, HUMAN IMMUNODEFICIENCY VIRUS
VQNAQGQMV

SEQ ID NO: 1163 - protein, 9 aa, HUMAN IMMUNODEFICIENCY VIRUS
VQNLQGQMV

SEQ ID NO: 1164 - protein, 9 aa, HUMAN IMMUNODEFICIENCY VIRUS
AQGQMVHQA

SEQ ID NO: 1165 - protein, 9 aa, HUMAN IMMUNODEFICIENCY VIRUS
LQGQMVHQA

SEQ ID NO: 1166 - protein, 9 aa, HUMAN IMMUNODEFICIENCY VIRUS
HQAISPRTL

SEQ ID NO: 1167 - protein, 9 aa, HUMAN IMMUNODEFICIENCY VIRUS
HQALSPRTL

SEQ ID NO: 1168 - protein, 9 aa, HUMAN IMMUNODEFICIENCY VIRUS
AISPRTLNA

SEQ ID NO: 1169 - protein, 9 aa, HUMAN IMMUNODEFICIENCY VIRUS
ALSPRTLNA

SEQ ID NO: 1170 - protein, 9 aa, HUMAN IMMUNODEFICIENCY VIRUS
RTLNAWVKV

SEQ ID NO: 1171 - protein, 9 aa, HUMAN IMMUNODEFICIENCY VIRUS
TLNAWVKVI

SEQ ID NO: 1172 - protein, 9 aa, HUMAN IMMUNODEFICIENCY VIRUS
TLNAWVKVV

SEQ ID NO: 1173 - protein, 9 aa, HUMAN IMMUNODEFICIENCY VIRUS
WVKVIEEKA

SEQ ID NO: 1174 - protein, 9 aa, HUMAN IMMUNODEFICIENCY VIRUS
WVKVVEEKA

SEQ ID NO: 1175 - protein, 9 aa, HUMAN IMMUNODEFICIENCY VIRUS
EVIPMFSAL

SEQ ID NO: 1176 - protein, 9 aa, HUMAN IMMUNODEFICIENCY VIRUS
EVIPMFTAL

SEQ ID NO: 1177 - protein, 9 aa, HUMAN IMMUNODEFICIENCY VIRUS
FTALSEGAT

SEQ ID NO: 1178 - protein, 9 aa, HUMAN IMMUNODEFICIENCY VIRUS
GATPQDLNM

SEQ ID NO: 1179 - protein, 9 aa, HUMAN IMMUNODEFICIENCY VIRUS
GATPQDLNT

SEQ ID NO: 1180 - protein, 9 aa, HUMAN IMMUNODEFICIENCY VIRUS
ATPQDLNMM

SEQ ID NO: 1181 - protein, 9 aa, HUMAN IMMUNODEFICIENCY VIRUS
ATPQDLNTM

SEQ ID NO: 1182 - protein, 9 aa, HUMAN IMMUNODEFICIENCY VIRUS
DLNMMLNIV

SEQ ID NO: 1183 - protein, 9 aa, HUMAN IMMUNODEFICIENCY VIRUS
DLNTMLNTV

SEQ ID NO: 1184 - protein, 9 aa, HUMAN IMMUNODEFICIENCY VIRUS
NIVGGHQAA

SEQ ID NO: 1185 - protein, 9 aa, HUMAN IMMUNODEFICIENCY VIRUS
NTVGGHQAA

SEQ ID NO: 1186 - protein, 9 aa, HUMAN IMMUNODEFICIENCY VIRUS
IVGGHQAAM

SEQ ID NO: 1187 - protein, 9 aa, HUMAN IMMUNODEFICIENCY VIRUS
TVGGHQAAM

SEQ ID NO: 1188 - protein, 9 aa, HUMAN IMMUNODEFICIENCY VIRUS
AAMQMLKDT

SEQ ID NO: 1189 - protein, 9 aa, HUMAN IMMUNODEFICIENCY VIRUS
AAMQMLKET

SEQ ID NO: 1190 - protein, 9 aa, HUMAN IMMUNODEFICIENCY VIRUS
AMQMLKDTI

SEQ ID NO: 1191 - protein, 9 aa, HUMAN IMMUNODEFICIENCY VIRUS
AMQMLKETI

SEQ ID NO: 1192 - protein, 9 aa, HUMAN IMMUNODEFICIENCY VIRUS
DIAGTTSTL

SEQ ID NO: 1193 - protein, 9 aa, HUMAN IMMUNODEFICIENCY VIRUS
TTSTLQEQI

SEQ ID NO: 1194 - protein, 9 aa, HUMAN IMMUNODEFICIENCY VIRUS
TLQEQIAWM

SEQ ID NO: 1195 - protein, 9 aa, HUMAN IMMUNODEFICIENCY VIRUS
TLQEQIGWM

SEQ ID NO: 1196 - protein, 9 aa, HUMAN IMMUNODEFICIENCY VIRUS
LQEQIAWMT

SEQ ID NO: 1197 - protein, 9 aa, HUMAN IMMUNODEFICIENCY VIRUS
LQEQIGWMT

SEQ ID NO: 1198 - protein, 9 aa, HUMAN IMMUNODEFICIENCY VIRUS
MTNNPPIPV

SEQ ID NO: 1199 - protein, 9 aa, HUMAN IMMUNODEFICIENCY VIRUS
MTSNPPIPV

SEQ ID NO: 1200 - protein, 9 aa, HUMAN IMMUNODEFICIENCY VIRUS
DIYKRWIIL

SEQ ID NO: 1201 - protein, 9 aa, HUMAN IMMUNODEFICIENCY VIRUS
EIYKRWIIL

SEQ ID NO: 1202 - protein, 9 aa, HUMAN IMMUNODEFICIENCY VIRUS
WIILGLNKI

SEQ ID NO: 1203 - protein, 9 aa, HUMAN IMMUNODEFICIENCY VIRUS
IILGLNKIV

SEQ ID NO: 1204 - protein, 9 aa, HUMAN IMMUNODEFICIENCY VIRUS
KIVRMYSPT

SEQ ID NO: 1205 - protein, 9 aa, HUMAN IMMUNODEFICIENCY VIRUS
KIVRMYSPV

SEQ ID NO: 1206 - protein, 9 aa, HUMAN IMMUNODEFICIENCY VIRUS
RMYSPTSIL

SEQ ID NO: 1207 - protein, 9 aa, HUMAN IMMUNODEFICIENCY VIRUS
RMYSPVSIL

SEQ ID NO: 1208 - protein, 9 aa, HUMAN IMMUNODEFICIENCY VIRUS
YVDRFFKTL

SEQ ID NO: 1209 - protein, 9 aa, HUMAN IMMUNODEFICIENCY VIRUS
YVDRFYKTL

SEQ ID NO: 1210 - protein, 9 aa, HUMAN IMMUNODEFICIENCY VIRUS
KTLRAEQAT

SEQ ID NO: 1211 - protein, 9 aa, HUMAN IMMUNODEFICIENCY VIRUS
RAEQASQEV

SEQ ID NO: 1212 - protein, 9 aa, HUMAN IMMUNODEFICIENCY VIRUS
RAEQATQDV

SEQ ID NO: 1213 - protein, 9 aa, HUMAN IMMUNODEFICIENCY VIRUS
RAEQATQEV

SEQ ID NO: 1214 - protein, 9 aa, HUMAN IMMUNODEFICIENCY VIRUS
ATQDVKNWM

SEQ ID NO: 1215 - protein, 9 aa, HUMAN IMMUNODEFICIENCY VIRUS
ATQEVKNWM

SEQ ID NO: 1216 - protein, 9 aa, HUMAN IMMUNODEFICIENCY VIRUS
SQEVKNWMT

SEQ ID NO: 1217 - protein, 9 aa, HUMAN IMMUNODEFICIENCY VIRUS
TQDVKNWMT

SEQ ID NO: 1218 - protein, 9 aa, HUMAN IMMUNODEFICIENCY VIRUS
TQEVKNWMT

SEQ ID NO: 1219 - protein, 9 aa, HUMAN IMMUNODEFICIENCY VIRUS
DVKNWMTDT

SEQ ID NO: 1220 - protein, 9 aa, HUMAN IMMUNODEFICIENCY VIRUS
DVKNWMTET

SEQ ID NO: 1221 - protein, 9 aa, HUMAN IMMUNODEFICIENCY VIRUS
EVKNWMTET

SEQ ID NO: 1222 - protein, 9 aa, HUMAN IMMUNODEFICIENCY VIRUS
NANPDCKSI

SEQ ID NO: 1223 - protein, 9 aa, HUMAN IMMUNODEFICIENCY VIRUS
NANPDCKTI

SEQ ID NO: 1224 - protein, 9 aa, HUMAN IMMUNODEFICIENCY VIRUS
TILKALGPA

SEQ ID NO: 1225 - protein, 9 aa, HUMAN IMMUNODEFICIENCY VIRUS
ILKALGPAA

SEQ ID NO: 1226 - protein, 9 aa, HUMAN IMMUNODEFICIENCY VIRUS
ILRALGPGA

SEQ ID NO: 1227 - protein, 9 aa, HUMAN IMMUNODEFICIENCY VIRUS
KALGPAATL

SEQ ID NO: 1228 - protein, 9 aa, HUMAN IMMUNODEFICIENCY VIRUS
PAATLEEMM

SEQ ID NO: 1229 - protein, 9 aa, HUMAN IMMUNODEFICIENCY VIRUS
AATLEEMMT

SEQ ID NO: 1230 - protein, 9 aa, HUMAN IMMUNODEFICIENCY VIRUS
GASLEEMMT

SEQ ID NO: 1231 - protein, 9 aa, HUMAN IMMUNODEFICIENCY VIRUS
GATLEEMMT

SEQ ID NO: 1232 - protein, 9 aa, HUMAN IMMUNODEFICIENCY VIRUS
ATLEEMMTA

SEQ ID NO: 1233 - protein, 9 aa, HUMAN IMMUNODEFICIENCY VIRUS
EMMTACQGV

SEQ ID NO: 1234 - protein, 9 aa, HUMAN IMMUNODEFICIENCY VIRUS
GVGGPGHKA

SEQ ID NO: 1235 - protein, 9 aa, HUMAN IMMUNODEFICIENCY VIRUS
GVGGPSHKA

SEQ ID NO: 1236 - protein, 9 aa, HUMAN IMMUNODEFICIENCY VIRUS
KARVLAEAM

SEQ ID NO: 1237 - protein, 9 aa, HUMAN IMMUNODEFICIENCY VIRUS
VLAEAMSQA

SEQ ID NO: 1238 - protein, 9 aa, HUMAN IMMUNODEFICIENCY VIRUS
VLAEAMSQV

SEQ ID NO: 1239 - protein, 9 aa, HUMAN IMMUNODEFICIENCY VIRUS
LAEAMSQVT

SEQ ID NO: 1240 - protein, 9 aa, HUMAN IMMUNODEFICIENCY VIRUS
AMSQVTNSA

SEQ ID NO: 1241 - protein, 9 aa, HUMAN IMMUNODEFICIENCY VIRUS
CTERQANFL

SEQ ID NO: 1242 - protein, 9 aa, HUMAN IMMUNODEFICIENCY VIRUS
RQANFLGKI

SEQ ID NO: 1243 - protein, 9 aa, HUMAN IMMUNODEFICIENCY VIRUS
FLQNRPEPT

SEQ ID NO: 1244 - protein, 9 aa, HUMAN IMMUNODEFICIENCY VIRUS
FLQSRPEPT

SEQ ID NO: 1245 - protein, 9 aa, HUMAN IMMUNODEFICIENCY VIRUS
LQNRPEPTA

SEQ ID NO: 1246 - protein, 9 aa, HUMAN IMMUNODEFICIENCY VIRUS
LQSRPEPTA

SEQ ID NO: 1247 - protein, 9 aa, HUMAN IMMUNODEFICIENCY VIRUS
PAEPTAPPA

SEQ ID NO: 1248 - protein, 9 aa, HUMAN IMMUNODEFICIENCY VIRUS
KQEPIDKEL

SEQ ID NO: 1249 - protein, 9 aa, HUMAN IMMUNODEFICIENCY VIRUS
PIDKELYPL

SEQ ID NO: 1250 - protein, 9 aa, HUMAN IMMUNODEFICIENCY VIRUS
KQEPIDKEL

SEQ ID NO: 1251 - protein, 9 aa, HUMAN IMMUNODEFICIENCY VIRUS
KQETIDKDL

SEQ ID NO: 1252 - protein, 9 aa, HUMAN IMMUNODEFICIENCY VIRUS
PIDKELYPL

SEQ ID NO: 1253 - protein, 9 aa, HUMAN IMMUNODEFICIENCY VIRUS
TIDKDLYPL

SEQ ID NO: 1254 - protein, 10 aa, HUMAN IMMUNODEFICIENCY VIRUS
RASVLSGGEL

SEQ ID NO: 1255 - protein, 10 aa, HUMAN IMMUNODEFICIENCY VIRUS
RASVLSGGKL

SEQ ID NO: 1256 - protein, 10 aa, HUMAN IMMUNODEFICIENCY VIRUS
SVLSGGKLDA

SEQ ID NO: 1257 - protein, 10 aa, HUMAN IMMUNODEFICIENCY VIRUS
KLDAWEKIRL

SEQ ID NO: 1258 - protein, 10 aa, HUMAN IMMUNODEFICIENCY VIRUS
KLDKWEKIRL

SEQ ID NO: 1259 - protein, 10 aa, HUMAN IMMUNODEFICIENCY VIRUS
WASRELERFA

SEQ ID NO: 1260 - protein, 10 aa, HUMAN IMMUNODEFICIENCY VIRUS
FALNPGLLET

SEQ ID NO: 1261 - protein, 10 aa, HUMAN IMMUNODEFICIENCY VIRUS
FAVNPGLLET

SEQ ID NO: 1262 - protein, 10 aa, HUMAN IMMUNODEFICIENCY VIRUS
ETSEGCRQIL

SEQ ID NO: 1263 - protein, 10 aa, HUMAN IMMUNODEFICIENCY VIRUS
QILGQLQPSL

SEQ ID NO: 1264 - protein, 10 aa, HUMAN IMMUNODEFICIENCY VIRUS
QLQPALQTGT

SEQ ID NO: 1265 - protein, 10 aa, HUMAN IMMUNODEFICIENCY VIRUS
QTGSEELRSL

SEQ ID NO: 1266 - protein, 10 aa, HUMAN IMMUNODEFICIENCY VIRUS
ELRSLYNTVA

SEQ ID NO: 1267 - protein, 10 aa, HUMAN IMMUNODEFICIENCY VIRUS
ATLYCVHQKI

SEQ ID NO: 1268 - protein, 10 aa, HUMAN IMMUNODEFICIENCY VIRUS
ATLYCVHQRI

SEQ ID NO: 1269 - protein, 10 aa, HUMAN IMMUNODEFICIENCY VIRUS
RIEVKDTKEA

SEQ ID NO: 1270 - protein, 10 aa, HUMAN IMMUNODEFICIENCY VIRUS
GAAAATDSNI

SEQ ID NO: 1271 - protein, 10 aa, HUMAN IMMUNODEFICIENCY VIRUS
AAGTGNSSQV

SEQ ID NO: 1272 - protein, 10 aa, HUMAN IMMUNODEFICIENCY VIRUS
SQVSQNYPIV

SEQ ID NO: 1273 - protein, 10 aa, HUMAN IMMUNODEFICIENCY VIRUS
SQNYPIVQNA

SEQ ID NO: 1274 - protein, 10 aa, HUMAN IMMUNODEFICIENCY VIRUS
SQNYPIVQNL

SEQ ID NO: 1275 - protein, 10 aa, HUMAN IMMUNODEFICIENCY VIRUS
PIVQNAQGQM

SEQ ID NO: 1276 - protein, 10 aa, HUMAN IMMUNODEFICIENCY VIRUS
PIVQNLQGQM

SEQ ID NO: 1277 - protein, 10 aa, HUMAN IMMUNODEFICIENCY VIRUS
IVQNAQGQMV

SEQ ID NO: 1278 - protein, 10 aa, HUMAN IMMUNODEFICIENCY VIRUS
IVQNLQGQMV

SEQ ID NO: 1279 - protein, 10 aa, HUMAN IMMUNODEFICIENCY VIRUS
NAQGQMVHQA

SEQ ID NO: 1280 - protein, 10 aa, HUMAN IMMUNODEFICIENCY VIRUS
NLQGQMVHQA

SEQ ID NO: 1281 - protein, 10 aa, HUMAN IMMUNODEFICIENCY VIRUS
LQGQMVHQAI

SEQ ID NO: 1282 - protein, 10 aa, HUMAN IMMUNODEFICIENCY VIRUS
MVHQAISPRT

SEQ ID NO: 1283 - protein, 10 aa, HUMAN IMMUNODEFICIENCY VIRUS
QAISPRTLNA

SEQ ID NO: 1284 - protein, 10 aa, HUMAN IMMUNODEFICIENCY VIRUS
QALSPRTLNA

SEQ ID NO: 1285 - protein, 10 aa, HUMAN IMMUNODEFICIENCY VIRUS
RTLNAWVKVI

SEQ ID NO: 1286 - protein, 10 aa, HUMAN IMMUNODEFICIENCY VIRUS
RTLNAWVKVV

SEQ ID NO: 1287 - protein, 10 aa, HUMAN IMMUNODEFICIENCY VIRUS
KAFSPEVIPM

SEQ ID NO: 1288 - protein, 10 aa, HUMAN IMMUNODEFICIENCY VIRUS
PMFSALSEGA

SEQ ID NO: 1289 - protein, 10 aa, HUMAN IMMUNODEFICIENCY VIRUS
PMFTALSEGA

SEQ ID NO: 1290 - protein, 10 aa, HUMAN IMMUNODEFICIENCY VIRUS
GATPQDLNMM

SEQ ID NO: 1291 - protein, 10 aa, HUMAN IMMUNODEFICIENCY VIRUS
GATPQDLNTM

SEQ ID NO: 1292 - protein, 10 aa, HUMAN IMMUNODEFICIENCY VIRUS
ATPQDLNMML

SEQ ID NO: 1293 - protein, 10 aa, HUMAN IMMUNODEFICIENCY VIRUS
ATPQDLNTML

SEQ ID NO: 1294 - protein, 10 aa, HUMAN IMMUNODEFICIENCY VIRUS
PQDLNMMLNI

SEQ ID NO: 1295 - protein, 10 aa, HUMAN IMMUNODEFICIENCY VIRUS
PQDLNTMLNT

SEQ ID NO: 1296 - protein, 10 aa, HUMAN IMMUNODEFICIENCY VIRUS
MLNIVGGHQA

SEQ ID NO: 1297 - protein, 10 aa, HUMAN IMMUNODEFICIENCY VIRUS
MLNTVGGHQA

SEQ ID NO: 1298 - protein, 10 aa, HUMAN IMMUNODEFICIENCY VIRUS
NIVGGHQAAM

SEQ ID NO: 1299 - protein, 10 aa, HUMAN IMMUNODEFICIENCY VIRUS
NTVGGHQAAM

SEQ ID NO: 1300 - protein, 10 aa, HUMAN IMMUNODEFICIENCY VIRUS
QAAMQMLKDT

SEQ ID NO: 1301 - protein, 10 aa, HUMAN IMMUNODEFICIENCY VIRUS
QAAMQMLKET

SEQ ID NO: 1302 - protein, 10 aa, HUMAN IMMUNODEFICIENCY VIRUS
AAMQMLKDTI

SEQ ID NO: 1303 - protein, 10 aa, HUMAN IMMUNODEFICIENCY VIRUS
AAMQMLKETI

SEQ ID NO: 1304 - protein, 10 aa, HUMAN IMMUNODEFICIENCY VIRUS
MLKDTINEEA

SEQ ID NO: 1305 - protein, 10 aa, HUMAN IMMUNODEFICIENCY VIRUS
MLKETINEEA

SEQ ID NO: 1306 - protein, 10 aa, HUMAN IMMUNODEFICIENCY VIRUS
AAEWDRLHPV

SEQ ID NO: 1307 - protein, 10 aa, HUMAN IMMUNODEFICIENCY VIRUS
AAEWDRVHPV

SEQ ID NO: 1308 - protein, 10 aa, HUMAN IMMUNODEFICIENCY VIRUS
RLHPVHAGPI

SEQ ID NO: 1309 - protein, 10 aa, HUMAN IMMUNODEFICIENCY VIRUS
RVHPVHAGPI

SEQ ID NO: 1310 - protein, 10 aa, HUMAN IMMUNODEFICIENCY VIRUS
HAGPIAPGQM

SEQ ID NO: 1311 - protein, 10 aa, HUMAN IMMUNODEFICIENCY VIRUS
HAGPIPPGQM

SEQ ID NO: 1312 - protein, 10 aa, HUMAN IMMUNODEFICIENCY VIRUS
QMREPRGSDI

SEQ ID NO: 1313 - protein, 10 aa, HUMAN IMMUNODEFICIENCY VIRUS
GTTSTLQEQI

SEQ ID NO: 1314 - protein, 10 aa, HUMAN IMMUNODEFICIENCY VIRUS
TTSTLQEQIA

SEQ ID NO: 1315 - protein, 10 aa, HUMAN IMMUNODEFICIENCY VIRUS
STLQEQIAWM

SEQ ID NO: 1316 - protein, 10 aa, HUMAN IMMUNODEFICIENCY VIRUS
STLQEQIGWM

SEQ ID NO: 1317 - protein, 10 aa, HUMAN IMMUNODEFICIENCY VIRUS
TLQEQIAWMT

SEQ ID NO: 1318 - protein, 10 aa, HUMAN IMMUNODEFICIENCY VIRUS
TLQEQIGWMT

SEQ ID NO: 1319 - protein, 10 aa, HUMAN IMMUNODEFICIENCY VIRUS
WMTNNPPIPV

SEQ ID NO: 1320 - protein, 10 aa, HUMAN IMMUNODEFICIENCY VIRUS
WMTSNPPIPV

SEQ ID NO: 1321 - protein, 10 aa, HUMAN IMMUNODEFICIENCY VIRUS
GANSIPVGDI

SEQ ID NO: 1322 - protein, 10 aa, HUMAN IMMUNODEFICIENCY VIRUS
PVGDIYKRWI

SEQ ID NO: 1323 - protein, 10 aa, HUMAN IMMUNODEFICIENCY VIRUS
PVGEIYKRWI

SEQ ID NO: 1324 - protein, 10 aa, HUMAN IMMUNODEFICIENCY VIRUS
WIILGLNKIV

SEQ ID NO: 1325 - protein, 10 aa, HUMAN IMMUNODEFICIENCY VIRUS
ILGLNKIVRM

SEQ ID NO: 1326 - protein, 10 aa, HUMAN IMMUNODEFICIENCY VIRUS
IVRMYSPTSI

SEQ ID NO: 1327 - protein, 10 aa, HUMAN IMMUNODEFICIENCY VIRUS
IVRMYSPVSI

SEQ ID NO: 1328 - protein, 10 aa, HUMAN IMMUNODEFICIENCY VIRUS
QASQEVKNWM

SEQ ID NO: 1329 - protein, 10 aa, HUMAN IMMUNODEFICIENCY VIRUS
QATQDVKNWM

SEQ ID NO: 1330 - protein, 10 aa, HUMAN IMMUNODEFICIENCY VIRUS
QATQEVKNWM

SEQ ID NO: 1331 - protein, 10 aa, HUMAN IMMUNODEFICIENCY VIRUS
ATQDVKNWMT

SEQ ID NO: 1332 - protein, 10 aa, HUMAN IMMUNODEFICIENCY VIRUS
ATQEVKNWMT

SEQ ID NO: 1333 - protein, 10 aa, HUMAN IMMUNODEFICIENCY VIRUS
DVKNWMTDTL

SEQ ID NO: 1334 - protein, 10 aa, HUMAN IMMUNODEFICIENCY VIRUS
DVKNWMTETL

SEQ ID NO: 1335 - protein, 10 aa, HUMAN IMMUNODEFICIENCY VIRUS
EVKNWMTETL

SEQ ID NO: 1336 - protein, 10 aa, HUMAN IMMUNODEFICIENCY VIRUS
MTDTLLVQNA

SEQ ID NO: 1337 - protein, 10 aa, HUMAN IMMUNODEFICIENCY VIRUS
MTETLLVQNA

SEQ ID NO: 1338 - protein, 10 aa, HUMAN IMMUNODEFICIENCY VIRUS
VQNANPDCKT

SEQ ID NO: 1339 - protein, 10 aa, HUMAN IMMUNODEFICIENCY VIRUS
NANPDCKSIL

SEQ ID NO: 1340 - protein, 10 aa, HUMAN IMMUNODEFICIENCY VIRUS
NANPDCKTIL

SEQ ID NO: 1341 - protein, 10 aa, HUMAN IMMUNODEFICIENCY VIRUS
KTILKALGPA

SEQ ID NO: 1342 - protein, 10 aa, HUMAN IMMUNODEFICIENCY VIRUS
TILKALGPAA

SEQ ID NO: 1343 - protein, 10 aa, HUMAN IMMUNODEFICIENCY VIRUS
TILRALGPGA

SEQ ID NO: 1344 - protein, 10 aa, HUMAN IMMUNODEFICIENCY VIRUS
ILKALGPAAT

SEQ ID NO: 1345 - protein, 10 aa, HUMAN IMMUNODEFICIENCY VIRUS
PAATLEEMMT

SEQ ID NO: 1346 - protein, 10 aa, HUMAN IMMUNODEFICIENCY VIRUS
AATLEEMMTA

SEQ ID NO: 1347 - protein, 10 aa, HUMAN IMMUNODEFICIENCY VIRUS
GASLEEMMTA

SEQ ID NO: 1348 - protein, 10 aa, HUMAN IMMUNODEFICIENCY VIRUS
GATLEEMMTA

SEQ ID NO: 1349 - protein, 10 aa, HUMAN IMMUNODEFICIENCY VIRUS
RVLAEAMSQA

SEQ ID NO: 1350 - protein, 10 aa, HUMAN IMMUNODEFICIENCY VIRUS
RVLAEAMSQV

SEQ ID NO: 1351 - protein, 10 aa, HUMAN IMMUNODEFICIENCY VIRUS
VLAEAMSQVT

SEQ ID NO: 1352 - protein, 10 aa, HUMAN IMMUNODEFICIENCY VIRUS
EAMSQVTNSA

SEQ ID NO: 1353 - protein, 10 aa, HUMAN IMMUNODEFICIENCY VIRUS
AMSQVTNSAT

SEQ ID NO: 1354 - protein, 10 aa, HUMAN IMMUNODEFICIENCY VIRUS
QMKDCTERQA

SEQ ID NO: 1355 - protein, 10 aa, HUMAN IMMUNODEFICIENCY VIRUS
FLQNRPEPTA

SEQ ID NO: 1356 - protein, 10 aa, HUMAN IMMUNODEFICIENCY VIRUS
FLQSRPEPTA

SEQ ID NO: 1357 - protein, 10 aa, HUMAN IMMUNODEFICIENCY VIRUS
PAESFRFEET

SEQ ID NO: 1358 - protein, 10 aa, HUMAN IMMUNODEFICIENCY VIRUS
TTPSQKQEPI

SEQ ID NO: 1359 - protein, 10 aa, HUMAN IMMUNODEFICIENCY VIRUS
ETIDKDLYPL

SEQ ID NO: 1360 - protein, 10 aa, HUMAN IMMUNODEFICIENCY VIRUS
PIDKELYPLT

SEQ ID NO: 1361 - protein, 10 aa, HUMAN IMMUNODEFICIENCY VIRUS
RTENSLYPPL

SEQ ID NO: 1362 - protein, 10 aa, HUMAN IMMUNODEFICIENCY VIRUS
TIDKDLYPLA

SEQ ID NO: 1363 - protein, 11 aa, HUMAN IMMUNODEFICIENCY VIRUS
WASRELERFAL

SEQ ID NO: 1364 - protein, 11 aa, HUMAN IMMUNODEFICIENCY VIRUS
WASRELERFAV

SEQ ID NO: 1365 - protein, 11 aa, HUMAN IMMUNODEFICIENCY VIRUS
ELERFALNPGL

SEQ ID NO: 1366 - protein, 11 aa, HUMAN IMMUNODEFICIENCY VIRUS
ELERFAVNPGL

SEQ ID NO: 1367 - protein, 11 aa, HUMAN IMMUNODEFICIENCY VIRUS
LLETSEGCRQI

SEQ ID NO: 1368 - protein, 11 aa, HUMAN IMMUNODEFICIENCY VIRUS
RQILGQLQPSL

SEQ ID NO: 1369 - protein, 11 aa, HUMAN IMMUNODEFICIENCY VIRUS
LQTGSEELRSL

SEQ ID NO: 1370 - protein, 11 aa, HUMAN IMMUNODEFICIENCY VIRUS
ELRSLYNTVAT

SEQ ID NO: 1371 - protein, 11 aa, HUMAN IMMUNODEFICIENCY VIRUS
VATLYCVHQKI

SEQ ID NO: 1372 - protein, 11 aa, HUMAN IMMUNODEFICIENCY VIRUS
VATLYCVHQRI

SEQ ID NO: 1373 - protein, 11 aa, HUMAN IMMUNODEFICIENCY VIRUS
RIEVKDTKEAL

SEQ ID NO: 1374 - protein, 11 aa, HUMAN IMMUNODEFICIENCY VIRUS
PIVQNAQGQMV

SEQ ID NO: 1375 - protein, 11 aa, HUMAN IMMUNODEFICIENCY VIRUS
PIVQNLQGQMV

SEQ ID NO: 1376 - protein, 11 aa, HUMAN IMMUNODEFICIENCY VIRUS
NLQGQMVHQAI

SEQ ID NO: 1377 - protein, 11 aa, HUMAN IMMUNODEFICIENCY VIRUS
QMVHQAISPRT

SEQ ID NO: 1378 - protein, 11 aa, HUMAN IMMUNODEFICIENCY VIRUS
MVHQAISPRTL

SEQ ID NO: 1379 - protein, 11 aa, HUMAN IMMUNODEFICIENCY VIRUS
HQAISPRTLNA

SEQ ID NO: 1380 - protein, 11 aa, HUMAN IMMUNODEFICIENCY VIRUS
HQALSPRTLNA

SEQ ID NO: 1381 - protein, 11 aa, HUMAN IMMUNODEFICIENCY VIRUS
AISPRTLNAWV

SEQ ID NO: 1382 - protein, 11 aa, HUMAN IMMUNODEFICIENCY VIRUS
ALSPRTLNAWV

SEQ ID NO: 1383 - protein, 11 aa, HUMAN IMMUNODEFICIENCY VIRUS
NAWVKVIEEKA

SEQ ID NO: 1384 - protein, 11 aa, HUMAN IMMUNODEFICIENCY VIRUS
NAWVKVVEEKA

SEQ ID NO: 1385 - protein, 11 aa, HUMAN IMMUNODEFICIENCY VIRUS
VIEEKAFSPEV

SEQ ID NO: 1386 - protein, 11 aa, HUMAN IMMUNODEFICIENCY VIRUS
VVEEKAFSPEV

SEQ ID NO: 1387 - protein, 11 aa, HUMAN IMMUNODEFICIENCY VIRUS
PMFSALSEGAT

SEQ ID NO: 1388 - protein, 11 aa, HUMAN IMMUNODEFICIENCY VIRUS
PMFTALSEGAT

SEQ ID NO: 1389 - protein, 11 aa, HUMAN IMMUNODEFICIENCY VIRUS
ALSEGATPQDL

SEQ ID NO: 1390 - protein, 11 aa, HUMAN IMMUNODEFICIENCY VIRUS
GATPQDLNMML

SEQ ID NO: 1391 - protein, 11 aa, HUMAN IMMUNODEFICIENCY VIRUS
GATPQDLNTML

SEQ ID NO: 1392 - protein, 11 aa, HUMAN IMMUNODEFICIENCY VIRUS
PQDLNMMLNIV

SEQ ID NO: 1393 - protein, 11 aa, HUMAN IMMUNODEFICIENCY VIRUS
PQDLNTMLNTV

SEQ ID NO: 1394 - protein, 11 aa, HUMAN IMMUNODEFICIENCY VIRUS
MMLNIVGGHQA

SEQ ID NO: 1395 - protein, 11 aa, HUMAN IMMUNODEFICIENCY VIRUS
TMLNTVGGHQA

SEQ ID NO: 1396 - protein, 11 aa, HUMAN IMMUNODEFICIENCY VIRUS
MLNIVGGHQAA

SEQ ID NO: 1397 - protein, 11 aa, HUMAN IMMUNODEFICIENCY VIRUS
MLNTVGGHQAA

SEQ ID NO: 1398 - protein, 11 aa, HUMAN IMMUNODEFICIENCY VIRUS
IVGGHQAAMQM

SEQ ID NO: 1399 - protein, 11 aa, HUMAN IMMUNODEFICIENCY VIRUS
TVGGHQAAMQM

SEQ ID NO: 1400 - protein, 11 aa, HUMAN IMMUNODEFICIENCY VIRUS
HQAAMQMLKDT

SEQ ID NO: 1401 - protein, 11 aa, HUMAN IMMUNODEFICIENCY VIRUS
HQAAMQMLKET

SEQ ID NO: 1402 - protein, 11 aa, HUMAN IMMUNODEFICIENCY VIRUS
QAAMQMLKDTI

SEQ ID NO: 1403 - protein, 11 aa, HUMAN IMMUNODEFICIENCY VIRUS
QAAMQMLKETI

SEQ ID NO: 1404 - protein, 11 aa, HUMAN IMMUNODEFICIENCY VIRUS
QMLKDTINEEA

SEQ ID NO: 1405 - protein, 11 aa, HUMAN IMMUNODEFICIENCY VIRUS
QMLKETINEEA

SEQ ID NO: 1406 - protein, 11 aa, HUMAN IMMUNODEFICIENCY VIRUS
MLKDTINEEAA

SEQ ID NO: 1407 - protein, 11 aa, HUMAN IMMUNODEFICIENCY VIRUS
MLKETINEEAA

SEQ ID NO: 1408 - protein, 11 aa, HUMAN IMMUNODEFICIENCY VIRUS
EAAEWDRLHPV

SEQ ID NO: 1409 - protein, 11 aa, HUMAN IMMUNODEFICIENCY VIRUS
EAAEWDRVHPV

SEQ ID NO: 1410 - protein, 11 aa, HUMAN IMMUNODEFICIENCY VIRUS
RLHPVHAGPIA

SEQ ID NO: 1411 - protein, 11 aa, HUMAN IMMUNODEFICIENCY VIRUS
GQMREPRGSDI

SEQ ID NO: 1412 - protein, 11 aa, HUMAN IMMUNODEFICIENCY VIRUS
QMREPRGSDIA

SEQ ID NO: 1413 - protein, 11 aa, HUMAN IMMUNODEFICIENCY VIRUS
GTTSTLQEQIA

SEQ ID NO: 1414 - protein, 11 aa, HUMAN IMMUNODEFICIENCY VIRUS
STLQEQIAWMT

SEQ ID NO: 1415 - protein, 11 aa, HUMAN IMMUNODEFICIENCY VIRUS
STLQEQIGWMT

SEQ ID NO: 1416 - protein, 11 aa, HUMAN IMMUNODEFICIENCY VIRUS
QIGWMTNNPPI

SEQ ID NO: 1417 - protein, 11 aa, HUMAN IMMUNODEFICIENCY VIRUS
QIGWMTSNPPI

SEQ ID NO: 1418 - protein, 11 aa, HUMAN IMMUNODEFICIENCY VIRUS
PVGDIYKRWII

SEQ ID NO: 1419 - protein, 11 aa, HUMAN IMMUNODEFICIENCY VIRUS
PVGEIYKRWII

SEQ ID NO: 1420 - protein, 11 aa, HUMAN IMMUNODEFICIENCY VIRUS
DIYKRWIILGL

SEQ ID NO: 1421 - protein, 11 aa, HUMAN IMMUNODEFICIENCY VIRUS
EIYKRWIILGL

SEQ ID NO: 1422 - protein, 11 aa, HUMAN IMMUNODEFICIENCY VIRUS
IILGLNKIVRM

SEQ ID NO: 1423 - protein, 11 aa, HUMAN IMMUNODEFICIENCY VIRUS
KIVRMYSPTSI

SEQ ID NO: 1424 - protein, 11 aa, HUMAN IMMUNODEFICIENCY VIRUS
KIVRMYSPVSI

SEQ ID NO: 1425 - protein, 11 aa, HUMAN IMMUNODEFICIENCY VIRUS
IVRMYSPTSIL

SEQ ID NO: 1426 - protein, 11 aa, HUMAN IMMUNODEFICIENCY VIRUS
IVRMYSPVSIL

SEQ ID NO: 1427 - protein, 11 aa, HUMAN IMMUNODEFICIENCY VIRUS
RMYSPTSILDI

SEQ ID NO: 1428 - protein, 11 aa, HUMAN IMMUNODEFICIENCY VIRUS
RMYSPVSILDI

SEQ ID NO: 1429 - protein, 11 aa, HUMAN IMMUNODEFICIENCY VIRUS
YVDRFFKTLRA

SEQ ID NO: 1430 - protein, 11 aa, HUMAN IMMUNODEFICIENCY VIRUS
YVDRFYKTLRA

SEQ ID NO: 1431 - protein, 11 aa, HUMAN IMMUNODEFICIENCY VIRUS
TLRAEQASQEV

SEQ ID NO: 1432 - protein, 11 aa, HUMAN IMMUNODEFICIENCY VIRUS
TLRAEQATQDV

SEQ ID NO: 1433 - protein, 11 aa, HUMAN IMMUNODEFICIENCY VIRUS
TLRAEQATQEV

SEQ ID NO: 1434 - protein, 11 aa, HUMAN IMMUNODEFICIENCY VIRUS
EQASQEVKNWM

SEQ ID NO: 1435 - protein, 11 aa, HUMAN IMMUNODEFICIENCY VIRUS
EQATQDVKNWM

SEQ ID NO: 1436 - protein, 11 aa, HUMAN IMMUNODEFICIENCY VIRUS
EQATQEVKNWM

SEQ ID NO: 1437 - protein, 11 aa, HUMAN IMMUNODEFICIENCY VIRUS
QASQEVKNWMT

SEQ ID NO: 1438 - protein, 11 aa, HUMAN IMMUNODEFICIENCY VIRUS
QATQDVKNWMT

SEQ ID NO: 1439 - protein, 11 aa, HUMAN IMMUNODEFICIENCY VIRUS
QATQEVKNWMT

SEQ ID NO: 1440 - protein, 11 aa, HUMAN IMMUNODEFICIENCY VIRUS
SQEVKNWMTET

SEQ ID NO: 1441 - protein, 11 aa, HUMAN IMMUNODEFICIENCY VIRUS
TQDVKNWMTDT

SEQ ID NO: 1442 - protein, 11 aa, HUMAN IMMUNODEFICIENCY VIRUS
TQEVKNWMTET

SEQ ID NO: 1443 - protein, 11 aa, HUMAN IMMUNODEFICIENCY VIRUS
DVKNWMTDTLL

SEQ ID NO: 1444 - protein, 11 aa, HUMAN IMMUNODEFICIENCY VIRUS
DVKNWMTETLL

SEQ ID NO: 1445 - protein, 11 aa, HUMAN IMMUNODEFICIENCY VIRUS
EVKNWMTETLL

SEQ ID NO: 1446 - protein, 11 aa, HUMAN IMMUNODEFICIENCY VIRUS
WMTDTLLVQNA

SEQ ID NO: 1447 - protein, 11 aa, HUMAN IMMUNODEFICIENCY VIRUS
WMTETLLVQNA

SEQ ID NO: 1448 - protein, 11 aa, HUMAN IMMUNODEFICIENCY VIRUS
LVQNANPDCKT

SEQ ID NO: 1449 - protein, 11 aa, HUMAN IMMUNODEFICIENCY VIRUS
VQNANPDCKSI

SEQ ID NO: 1450 - protein, 11 aa, HUMAN IMMUNODEFICIENCY VIRUS
VQNANPDCKTI

SEQ ID NO: 1451 - protein, 11 aa, HUMAN IMMUNODEFICIENCY VIRUS
KTILKALGPAA

SEQ ID NO: 1452 - protein, 11 aa, HUMAN IMMUNODEFICIENCY VIRUS
KTILRALGPGA

SEQ ID NO: 1453 - protein, 11 aa, HUMAN IMMUNODEFICIENCY VIRUS
TILKALGPAAT

SEQ ID NO: 1454 - protein, 11 aa, HUMAN IMMUNODEFICIENCY VIRUS
ILKALGPAATL

SEQ ID NO: 1455 - protein, 11 aa, HUMAN IMMUNODEFICIENCY VIRUS
ALGPAATLEEM

SEQ ID NO: 1456 - protein, 11 aa, HUMAN IMMUNODEFICIENCY VIRUS
ALGPGATLEEM

SEQ ID NO: 1457 - protein, 11 aa, HUMAN IMMUNODEFICIENCY VIRUS
PAATLEEMMTA

SEQ ID NO: 1458 - protein, 11 aa, HUMAN IMMUNODEFICIENCY VIRUS
CQGVGGPGHKA

SEQ ID NO: 1459 - protein, 11 aa, HUMAN IMMUNODEFICIENCY VIRUS
CQGVGGPSHKA

SEQ ID NO: 1460 - protein, 11 aa, HUMAN IMMUNODEFICIENCY VIRUS
GVGGPGHKARV

SEQ ID NO: 1461 - protein, 11 aa, HUMAN IMMUNODEFICIENCY VIRUS
GVGGPSHKARV

SEQ ID NO: 1462 - protein, 11 aa, HUMAN IMMUNODEFICIENCY VIRUS
RVLAEAMSQVT

SEQ ID NO: 1463 - protein, 11 aa, HUMAN IMMUNODEFICIENCY VIRUS
EAMSQVTNSAT

SEQ ID NO: 1464 - protein, 11 aa, HUMAN IMMUNODEFICIENCY VIRUS
SAQQDLKGGYT

SEQ ID NO: 1465 - protein, 11 aa, HUMAN IMMUNODEFICIENCY VIRUS
TAQQDLKGGYT

SEQ ID NO: 1466 - protein, 11 aa, HUMAN IMMUNODEFICIENCY VIRUS
HQMKDCTERQA

SEQ ID NO: 1467 - protein, 11 aa, HUMAN IMMUNODEFICIENCY VIRUS
PAEPTAPPAEI

SEQ ID NO: 1468 - protein, 11 aa, HUMAN IMMUNODEFICIENCY VIRUS
PAESFRFEETT

SEQ ID NO: 1469 - protein, 11 aa, HUMAN IMMUNODEFICIENCY VIRUS
SQKQEPIDKEL

SEQ ID NO: 1470 - protein, 11 aa, HUMAN IMMUNODEFICIENCY VIRUS
ETIDKDLYPLA

SEQ ID NO: 1471 - protein, 11 aa, HUMAN IMMUNODEFICIENCY VIRUS
RTENSLYPPLT

SEQ ID NO: 1472 - protein, 11 aa, HUMAN IMMUNODEFICIENCY VIRUS
SLKSLFGNDPL

SEQ ID NO: 1473 - protein, 8 aa, HUMAN IMMUNODEFICIENCY VIRUS
RAQAEPAA

SEQ ID NO: 1474 - protein, 8 aa, HUMAN IMMUNODEFICIENCY VIRUS
AQAEPAAA

SEQ ID NO: 1475 - protein, 8 aa, HUMAN IMMUNODEFICIENCY VIRUS
PAADGVGA

SEQ ID NO: 1476 - protein, 8 aa, HUMAN IMMUNODEFICIENCY VIRUS
PAAEGVGA

SEQ ID NO: 1477 - protein, 8 aa, HUMAN IMMUNODEFICIENCY VIRUS
AADGVGAV

SEQ ID NO: 1478 - protein, 8 aa, HUMAN IMMUNODEFICIENCY VIRUS
AAEGVGAA

SEQ ID NO: 1479 - protein, 8 aa, HUMAN IMMUNODEFICIENCY VIRUS
AAEGVGAV

SEQ ID NO: 1480 - protein, 8 aa, HUMAN IMMUNODEFICIENCY VIRUS
DLEKHGAI

SEQ ID NO: 1481 - protein, 8 aa, HUMAN IMMUNODEFICIENCY VIRUS
GAITSSNT

SEQ ID NO: 1482 - protein, 8 aa, HUMAN IMMUNODEFICIENCY VIRUS
GALTSSNT

SEQ ID NO: 1483 - protein, 8 aa, HUMAN IMMUNODEFICIENCY VIRUS
AITSSNTA

SEQ ID NO: 1484 - protein, 8 aa, HUMAN IMMUNODEFICIENCY VIRUS
ITSSNTAA

SEQ ID NO: 1485 - protein, 8 aa, HUMAN IMMUNODEFICIENCY VIRUS
AATNADCA

SEQ ID NO: 1486 - protein, 8 aa, HUMAN IMMUNODEFICIENCY VIRUS
EAQEEEEV

SEQ ID NO: 1487 - protein, 8 aa, HUMAN IMMUNODEFICIENCY VIRUS
PVRPQVPL

SEQ ID NO: 1488 - protein, 8 aa, HUMAN IMMUNODEFICIENCY VIRUS
PQVPLRPM

SEQ ID NO: 1489 - protein, 8 aa, HUMAN IMMUNODEFICIENCY VIRUS
QVPLRPMT

SEQ ID NO: 1490 - protein, 8 aa, HUMAN IMMUNODEFICIENCY VIRUS
ALDLSHFL

SEQ ID NO: 1491 - protein, 8 aa, HUMAN IMMUNODEFICIENCY VIRUS
AVDLSHFL

SEQ ID NO: 1492 - protein, 8 aa, HUMAN IMMUNODEFICIENCY VIRUS
FLKEKGGL

SEQ ID NO: 1493 - protein, 8 aa, HUMAN IMMUNODEFICIENCY VIRUS
SQKRQDIL

SEQ ID NO: 1494 - protein, 9 aa, HUMAN IMMUNODEFICIENCY VIRUS
QTEPAAVGV

SEQ ID NO: 1495 - protein, 9 aa, HUMAN IMMUNODEFICIENCY VIRUS
RAEPAADGV

SEQ ID NO: 1496 - protein, 9 aa, HUMAN IMMUNODEFICIENCY VIRUS
RAQAEPAAA

SEQ ID NO: 1497 - protein, 9 aa, HUMAN IMMUNODEFICIENCY VIRUS
RTEPAAVGV

SEQ ID NO: 1498 - protein, 9 aa, HUMAN IMMUNODEFICIENCY VIRUS
QAEPAAEGV

SEQ ID NO: 1499 - protein, 9 aa, HUMAN IMMUNODEFICIENCY VIRUS
QAPTAAKGV

SEQ ID NO: 1500 - protein, 9 aa, HUMAN IMMUNODEFICIENCY VIRUS
QAEPAAAGV

SEQ ID NO: 1501 - protein, 9 aa, HUMAN IMMUNODEFICIENCY VIRUS
PAADGVGAV

SEQ ID NO: 1502 - protein, 9 aa, HUMAN IMMUNODEFICIENCY VIRUS
PAAEGVGAV

SEQ ID NO: 1503 - protein, 9 aa, HUMAN IMMUNODEFICIENCY VIRUS
GVGAASQDL

SEQ ID NO: 1504 - protein, 9 aa, HUMAN IMMUNODEFICIENCY VIRUS
GVGAVSQDL

SEQ ID NO: 1505 - protein, 9 aa, HUMAN IMMUNODEFICIENCY VIRUS
GVGAVSRDL

SEQ ID NO: 1506 - protein, 9 aa, HUMAN IMMUNODEFICIENCY VIRUS
DLEKHGAIT

SEQ ID NO: 1507 - protein, 9 aa, HUMAN IMMUNODEFICIENCY VIRUS
GAITSSNTA

SEQ ID NO: 1508 - protein, 9 aa, HUMAN IMMUNODEFICIENCY VIRUS
AITSSNTAA

SEQ ID NO: 1509 - protein, 9 aa, HUMAN IMMUNODEFICIENCY VIRUS
ITSSNTAAT

SEQ ID NO: 1510 - protein, 9 aa, HUMAN IMMUNODEFICIENCY VIRUS
TAATNADCA

SEQ ID NO: 1511 - protein, 9 aa, HUMAN IMMUNODEFICIENCY VIRUS
ATNADCAWL

SEQ ID NO: 1512 - protein, 9 aa, HUMAN IMMUNODEFICIENCY VIRUS
NADCAWLEA

SEQ ID NO: 1513 - protein, 9 aa, HUMAN IMMUNODEFICIENCY VIRUS
PQVPLRPMT

SEQ ID NO: 1514 - protein, 9 aa, HUMAN IMMUNODEFICIENCY VIRUS
PLRPMTYKA

SEQ ID NO: 1515 - protein, 9 aa, HUMAN IMMUNODEFICIENCY VIRUS
MTYKGAFDL

SEQ ID NO: 1516 - protein, 9 aa, HUMAN IMMUNODEFICIENCY VIRUS
GAFDLSFFL

SEQ ID NO: 1517 - protein, 9 aa, HUMAN IMMUNODEFICIENCY VIRUS
RQDILDLWV

SEQ ID NO: 1518 - protein, 9 aa, HUMAN IMMUNODEFICIENCY VIRUS
RQEILDLWV

SEQ ID NO: 1519 - protein, 9 aa, HUMAN IMMUNODEFICIENCY VIRUS
ILDLWVYHT

SEQ ID NO: 1520 - protein, 9 aa, HUMAN IMMUNODEFICIENCY VIRUS
ILDLWVYNT

SEQ ID NO: 1521 - protein, 9 aa, HUMAN IMMUNODEFICIENCY VIRUS
LTFGWCFKL

SEQ ID NO: 1522 - protein, 9 aa, HUMAN IMMUNODEFICIENCY VIRUS
LVPVDPREV

SEQ ID NO: 1523 - protein, 10 aa, HUMAN IMMUNODEFICIENCY VIRUS
KQAEPAAEGV

SEQ ID NO: 1524 - protein, 10 aa, HUMAN IMMUNODEFICIENCY VIRUS
RQAPTAAKGV

SEQ ID NO: 1525 - protein, 10 aa, HUMAN IMMUNODEFICIENCY VIRUS
AQAEPAAAGV

SEQ ID NO: 1526 - protein, 10 aa, HUMAN IMMUNODEFICIENCY VIRUS
GAITSSNTAA

SEQ ID NO: 1527 - protein, 10 aa, HUMAN IMMUNODEFICIENCY VIRUS
AITSSNTAAT

SEQ ID NO: 1528 - protein, 10 aa, HUMAN IMMUNODEFICIENCY VIRUS
NTAATNADCA

SEQ ID NO: 1529 - protein, 10 aa, HUMAN IMMUNODEFICIENCY VIRUS
AATNADCAWL

SEQ ID NO: 1530 - protein, 10 aa, HUMAN IMMUNODEFICIENCY VIRUS
WLEAQEEEEV

SEQ ID NO: 1531 - protein, 10 aa, HUMAN IMMUNODEFICIENCY VIRUS
EVGFPVRPQV

SEQ ID NO: 1532 - protein, 10 aa, HUMAN IMMUNODEFICIENCY VIRUS
PLRPMTYKAA

SEQ ID NO: 1533 - protein, 10 aa, HUMAN IMMUNODEFICIENCY VIRUS
PLRPMTYKGA

SEQ ID NO: 1534 - protein, 10 aa, HUMAN IMMUNODEFICIENCY VIRUS
PMTYKGAFDL

SEQ ID NO: 1535 - protein, 10 aa, HUMAN IMMUNODEFICIENCY VIRUS
LIYSKKRQEI

SEQ ID NO: 1536 - protein, 10 aa, HUMAN IMMUNODEFICIENCY VIRUS
SQKRQDILDL

SEQ ID NO: 1537 - protein, 10 aa, HUMAN IMMUNODEFICIENCY VIRUS
DILDLWVYHT

SEQ ID NO: 1538 - protein, 10 aa, HUMAN IMMUNODEFICIENCY VIRUS
EILDLWVYHT

SEQ ID NO: 1539 - protein, 10 aa, HUMAN IMMUNODEFICIENCY VIRUS
EILDLWVYNT

SEQ ID NO: 1540 - protein, 10 aa, HUMAN IMMUNODEFICIENCY VIRUS
WQNYTPGPGI

SEQ ID NO: 1541 - protein, 10 aa, HUMAN IMMUNODEFICIENCY VIRUS
WQNYTPGPGT

SEQ ID NO: 1542 - protein, 10 aa, HUMAN IMMUNODEFICIENCY VIRUS
WQNYTPGPGV

SEQ ID NO: 1543 - protein, 10 aa, HUMAN IMMUNODEFICIENCY VIRUS
PLTFGWCFKL

SEQ ID NO: 1544 - protein, 10 aa, HUMAN IMMUNODEFICIENCY VIRUS
LTFGWCFKLV

SEQ ID NO: 1545 - protein, 10 aa, HUMAN IMMUNODEFICIENCY VIRUS
KLVPVDPREV

SEQ ID NO: 1546 - protein, 10 aa, HUMAN IMMUNODEFICIENCY VIRUS
LLHPICQHGM

SEQ ID NO: 1547 - protein, 10 aa, HUMAN IMMUNODEFICIENCY VIRUS
LLHPMSQHGM

SEQ ID NO: 1548 - protein, 11 aa, HUMAN IMMUNODEFICIENCY VIRUS
QTEPAAVGVGA

SEQ ID NO: 1549 - protein, 11 aa, HUMAN IMMUNODEFICIENCY VIRUS
RAEPAADGVGA

SEQ ID NO: 1550 - protein, 11 aa, HUMAN IMMUNODEFICIENCY VIRUS
RAQAEPAAAGV

SEQ ID NO: 1551 - protein, 11 aa, HUMAN IMMUNODEFICIENCY VIRUS
RTEPAAVGVGA

SEQ ID NO: 1552 - protein, 11 aa, HUMAN IMMUNODEFICIENCY VIRUS
QAEPAAEGVGA

SEQ ID NO: 1553 - protein, 11 aa, HUMAN IMMUNODEFICIENCY VIRUS
QAPTAAKGVGA

SEQ ID NO: 1554 - protein, 11 aa, HUMAN IMMUNODEFICIENCY VIRUS
QAEPAAAGVGA

SEQ ID NO: 1555 - protein, 11 aa, HUMAN IMMUNODEFICIENCY VIRUS
AVSRDLEKHGA

SEQ ID NO: 1556 - protein, 11 aa, HUMAN IMMUNODEFICIENCY VIRUS
GAITSSNTAAT

SEQ ID NO: 1557 - protein, 11 aa, HUMAN IMMUNODEFICIENCY VIRUS
ITSSNTAATNA

SEQ ID NO: 1558 - protein, 11 aa, HUMAN IMMUNODEFICIENCY VIRUS
TAATNADCAWL

SEQ ID NO: 1559 - protein, 11 aa, HUMAN IMMUNODEFICIENCY VIRUS
ATNADCAWLEA

SEQ ID NO: 1560 - protein, 11 aa, HUMAN IMMUNODEFICIENCY VIRUS
AQEEEEVGFPV

SEQ ID NO: 1561 - protein, 11 aa, HUMAN IMMUNODEFICIENCY VIRUS
PVRPQVPLRPM

SEQ ID NO: 1562 - protein, 11 aa, HUMAN IMMUNODEFICIENCY VIRUS
QVPLRPMTYKA

SEQ ID NO: 1563 - protein, 11 aa, HUMAN IMMUNODEFICIENCY VIRUS
FLKEKGGLDGL

SEQ ID NO: 1564 - protein, 11 aa, HUMAN IMMUNODEFICIENCY VIRUS
FLKEKGGLEGL

SEQ ID NO: 1565 - protein, 11 aa, HUMAN IMMUNODEFICIENCY VIRUS
GLIYSKKRQEI

SEQ ID NO: 1566 - protein, 11 aa, HUMAN IMMUNODEFICIENCY VIRUS
LIYSKKRQEIL

SEQ ID NO: 1567 - protein, 11 aa, HUMAN IMMUNODEFICIENCY VIRUS
YTPGPGIRYPL

SEQ ID NO: 1568 - protein, 11 aa, HUMAN IMMUNODEFICIENCY VIRUS
YTPGPGTRFPL

SEQ ID NO: 1569 - protein, 11 aa, HUMAN IMMUNODEFICIENCY VIRUS
PLTFGWCFKLV

SEQ ID NO: 1570 - protein, 11 aa, HUMAN IMMUNODEFICIENCY VIRUS
CLLHPMSQHGM

SEQ ID NO: 1571 - protein, 8 aa, HUMAN IMMUNODEFICIENCY VIRUS
LAFPQGEA

SEQ ID NO: 1572 - protein, 8 aa, HUMAN IMMUNODEFICIENCY VIRUS
LAFPQGKA

SEQ ID NO: 1573 - protein, 8 aa, HUMAN IMMUNODEFICIENCY VIRUS
LAFQQGEA

SEQ ID NO: 1574 - protein, 8 aa, HUMAN IMMUNODEFICIENCY VIRUS
QTRANSPT

SEQ ID NO: 1575 - protein, 8 aa, HUMAN IMMUNODEFICIENCY VIRUS
PTRRELQV

SEQ ID NO: 1576 - protein, 8 aa, HUMAN IMMUNODEFICIENCY VIRUS
QTRANSPT

SEQ ID NO: 1577 - protein, 8 aa, HUMAN IMMUNODEFICIENCY VIRUS
PTSRELQV

SEQ ID NO: 1578 - protein, 8 aa, HUMAN IMMUNODEFICIENCY VIRUS
GADRQGIV

SEQ ID NO: 1579 - protein, 8 aa, HUMAN IMMUNODEFICIENCY VIRUS
GTLNCPQI

SEQ ID NO: 1580 - protein, 8 aa, HUMAN IMMUNODEFICIENCY VIRUS
PTFNFPQI

SEQ ID NO: 1581 - protein, 8 aa, HUMAN IMMUNODEFICIENCY VIRUS
ITLWQRPL

SEQ ID NO: 1582 - protein, 8 aa, HUMAN IMMUNODEFICIENCY VIRUS
TLWQRPLV

SEQ ID NO: 1583 - protein, 8 aa, HUMAN IMMUNODEFICIENCY VIRUS
WQRPLVTI

SEQ ID NO: 1584 - protein, 8 aa, HUMAN IMMUNODEFICIENCY VIRUS
WQRPLVTV

SEQ ID NO: 1585 - protein, 8 aa, HUMAN IMMUNODEFICIENCY VIRUS
TIKIGGQL

SEQ ID NO: 1586 - protein, 8 aa, HUMAN IMMUNODEFICIENCY VIRUS
TVKIGGQL

SEQ ID NO: 1587 - protein, 8 aa, HUMAN IMMUNODEFICIENCY VIRUS
GQLIEALL

SEQ ID NO: 1588 - protein, 8 aa, HUMAN IMMUNODEFICIENCY VIRUS
GQLKEALL

SEQ ID NO: 1589 - protein, 8 aa, HUMAN IMMUNODEFICIENCY VIRUS
LIEALLDT

SEQ ID NO: 1590 - protein, 8 aa, HUMAN IMMUNODEFICIENCY VIRUS
EALLDTGA

SEQ ID NO: 1591 - protein, 8 aa, HUMAN IMMUNODEFICIENCY VIRUS
DTGADDTV

SEQ ID NO: 1592 - protein, 8 aa, HUMAN IMMUNODEFICIENCY VIRUS
TVLEDINL

SEQ ID NO: 1593 - protein, 8 aa, HUMAN IMMUNODEFICIENCY VIRUS
TVLEEINL

SEQ ID NO: 1594 - protein, 8 aa, HUMAN IMMUNODEFICIENCY VIRUS
GIGGFIKV

SEQ ID NO: 1595 - protein, 8 aa, HUMAN IMMUNODEFICIENCY VIRUS
KVRQYDQI

SEQ ID NO: 1596 - protein, 8 aa, HUMAN IMMUNODEFICIENCY VIRUS
RQYDQILI

SEQ ID NO: 1597 - protein, 8 aa, HUMAN IMMUNODEFICIENCY VIRUS
RQYDQIPI

SEQ ID NO: 1598 - protein, 8 aa, HUMAN IMMUNODEFICIENCY VIRUS
EICGHKAI

SEQ ID NO: 1599 - protein, 8 aa, HUMAN IMMUNODEFICIENCY VIRUS
EICGKKAI

SEQ ID NO: 1600 - protein, 8 aa, HUMAN IMMUNODEFICIENCY VIRUS
KAIGTVLV

SEQ ID NO: 1601 - protein, 8 aa, HUMAN IMMUNODEFICIENCY VIRUS
GTVLVGPT

SEQ ID NO: 1602 - protein, 8 aa, HUMAN IMMUNODEFICIENCY VIRUS
VLVGPTPV

SEQ ID NO: 1603 - protein, 8 aa, HUMAN IMMUNODEFICIENCY VIRUS
NIIGRNLL

SEQ ID NO: 1604 - protein, 8 aa, HUMAN IMMUNODEFICIENCY VIRUS
NIIGRNML

SEQ ID NO: 1605 - protein, 8 aa, HUMAN IMMUNODEFICIENCY VIRUS
IIGRNLLT

SEQ ID NO: 1606 - protein, 8 aa, HUMAN IMMUNODEFICIENCY VIRUS
IIGRNMLT

SEQ ID NO: 1607 - protein, 8 aa, HUMAN IMMUNODEFICIENCY VIRUS
LLTQIGCT

SEQ ID NO: 1608 - protein, 8 aa, HUMAN IMMUNODEFICIENCY VIRUS
MLTQIGCT

SEQ ID NO: 1609 - protein, 8 aa, HUMAN IMMUNODEFICIENCY VIRUS
MLTQLGCT

SEQ ID NO: 1610 - protein, 8 aa, HUMAN IMMUNODEFICIENCY VIRUS
LTQIGCTL

SEQ ID NO: 1611 - protein, 8 aa, HUMAN IMMUNODEFICIENCY VIRUS
LTQLGCTL

SEQ ID NO: 1612 - protein, 8 aa, HUMAN IMMUNODEFICIENCY VIRUS
PISPIETV

SEQ ID NO: 1613 - protein, 8 aa, HUMAN IMMUNODEFICIENCY VIRUS
PVKLKPGM

SEQ ID NO: 1614 - protein, 8 aa, HUMAN IMMUNODEFICIENCY VIRUS
KVKQWPLT

SEQ ID NO: 1615 - protein, 8 aa, HUMAN IMMUNODEFICIENCY VIRUS
LTEEKIKA

SEQ ID NO: 1616 - protein, 8 aa, HUMAN IMMUNODEFICIENCY VIRUS
KIKALTEI

SEQ ID NO: 1617 - protein, 8 aa, HUMAN IMMUNODEFICIENCY VIRUS
KIKALVEI

SEQ ID NO: 1618 - protein, 8 aa, HUMAN IMMUNODEFICIENCY VIRUS
KALTEICT

SEQ ID NO: 1619 - protein, 8 aa, HUMAN IMMUNODEFICIENCY VIRUS
KALVEICT

SEQ ID NO: 1620 - protein, 8 aa, HUMAN IMMUNODEFICIENCY VIRUS
LVEICTEM

SEQ ID NO: 1621 - protein, 8 aa, HUMAN IMMUNODEFICIENCY VIRUS
EMEKEGKI

SEQ ID NO: 1622 - protein, 8 aa, HUMAN IMMUNODEFICIENCY VIRUS
AIKKKDST

SEQ ID NO: 1623 - protein, 8 aa, HUMAN IMMUNODEFICIENCY VIRUS
STKWRKLV

SEQ ID NO: 1624 - protein, 8 aa, HUMAN IMMUNODEFICIENCY VIRUS
KLVDFREL

SEQ ID NO: 1625 - protein, 8 aa, HUMAN IMMUNODEFICIENCY VIRUS
RTQDFWEV

SEQ ID NO: 1626 - protein, 8 aa, HUMAN IMMUNODEFICIENCY VIRUS
QLGIPHPA

SEQ ID NO: 1627 - protein, 8 aa, HUMAN IMMUNODEFICIENCY VIRUS
GIPHPAGL

SEQ ID NO: 1628 - protein, 8 aa, HUMAN IMMUNODEFICIENCY VIRUS
GLKKKKSV

SEQ ID NO: 1629 - protein, 8 aa, HUMAN IMMUNODEFICIENCY VIRUS
TVLDVGDA

SEQ ID NO: 1630 - protein, 8 aa, HUMAN IMMUNODEFICIENCY VIRUS
DAYFSVPL

SEQ ID NO: 1631 - protein, 8 aa, HUMAN IMMUNODEFICIENCY VIRUS
TAFTIPSI

SEQ ID NO: 1632 - protein, 8 aa, HUMAN IMMUNODEFICIENCY VIRUS
TAFTIPST

SEQ ID NO: 1633 - protein, 8 aa, HUMAN IMMUNODEFICIENCY VIRUS
GIRYQYNV

SEQ ID NO: 1634 - protein, 8 aa, HUMAN IMMUNODEFICIENCY VIRUS
PAIFQSSM

SEQ ID NO: 1635 - protein, 8 aa, HUMAN IMMUNODEFICIENCY VIRUS
AIFQSSMT

SEQ ID NO: 1636 - protein, 8 aa, HUMAN IMMUNODEFICIENCY VIRUS
FQSSMTKI

SEQ ID NO: 1637 - protein, 8 aa, HUMAN IMMUNODEFICIENCY VIRUS
KQNPDIVI

SEQ ID NO: 1638 - protein, 8 aa, HUMAN IMMUNODEFICIENCY VIRUS
DIVIYQYM

SEQ ID NO: 1639 - protein, 8 aa, HUMAN IMMUNODEFICIENCY VIRUS
EIVIYQYM

SEQ ID NO: 1640 - protein, 8 aa, HUMAN IMMUNODEFICIENCY VIRUS
DLYVGSDL

SEQ ID NO: 1641 - protein, 8 aa, HUMAN IMMUNODEFICIENCY VIRUS
YVGSDLEI

SEQ ID NO: 1642 - protein, 8 aa, HUMAN IMMUNODEFICIENCY VIRUS
HLLKWGFT

SEQ ID NO: 1643 - protein, 8 aa, HUMAN IMMUNODEFICIENCY VIRUS
HLLRWGFT

SEQ ID NO: 1644 - protein, 8 aa, HUMAN IMMUNODEFICIENCY VIRUS
LLKWGFTT

SEQ ID NO: 1645 - protein, 8 aa, HUMAN IMMUNODEFICIENCY VIRUS
LLRWGFTT

SEQ ID NO: 1646 - protein, 8 aa, HUMAN IMMUNODEFICIENCY VIRUS
HQKEPPFL

SEQ ID NO: 1647 - protein, 8 aa, HUMAN IMMUNODEFICIENCY VIRUS
FLWMGYEL

SEQ ID NO: 1648 - protein, 8 aa, HUMAN IMMUNODEFICIENCY VIRUS
ELHPDKWT

SEQ ID NO: 1649 - protein, 8 aa, HUMAN IMMUNODEFICIENCY VIRUS
WTVQPIQL

SEQ ID NO: 1650 - protein, 8 aa, HUMAN IMMUNODEFICIENCY VIRUS
WTVQPIVL

SEQ ID NO: 1651 - protein, 8 aa, HUMAN IMMUNODEFICIENCY VIRUS
TVNDIQKL

SEQ ID NO: 1652 - protein, 8 aa, HUMAN IMMUNODEFICIENCY VIRUS
IQKLVGKL

SEQ ID NO: 1653 - protein, 8 aa, HUMAN IMMUNODEFICIENCY VIRUS
LVGKLNWA

SEQ ID NO: 1654 - protein, 8 aa, HUMAN IMMUNODEFICIENCY VIRUS
KLNWASQI

SEQ ID NO: 1655 - protein, 8 aa, HUMAN IMMUNODEFICIENCY VIRUS
QIYAGIKV

SEQ ID NO: 1656 - protein, 8 aa, HUMAN IMMUNODEFICIENCY VIRUS
QIYPGIKV

SEQ ID NO: 1657 - protein, 8 aa, HUMAN IMMUNODEFICIENCY VIRUS
KVKQLCKL

SEQ ID NO: 1658 - protein, 8 aa, HUMAN IMMUNODEFICIENCY VIRUS
KVRQLCKL

SEQ ID NO: 1659 - protein, 8 aa, HUMAN IMMUNODEFICIENCY VIRUS
KLLRGAKA

SEQ ID NO: 1660 - protein, 8 aa, HUMAN IMMUNODEFICIENCY VIRUS
KLLRGTKA

SEQ ID NO: 1661 - protein, 8 aa, HUMAN IMMUNODEFICIENCY VIRUS
LLRGAKAL

SEQ ID NO: 1662 - protein, 8 aa, HUMAN IMMUNODEFICIENCY VIRUS
LLRGTKAL

SEQ ID NO: 1663 - protein, 8 aa, HUMAN IMMUNODEFICIENCY VIRUS
GAKALTDI

SEQ ID NO: 1664 - protein, 8 aa, HUMAN IMMUNODEFICIENCY VIRUS
GTKALTEV

SEQ ID NO: 1665 - protein, 8 aa, HUMAN IMMUNODEFICIENCY VIRUS
ALTDIVPL

SEQ ID NO: 1666 - protein, 8 aa, HUMAN IMMUNODEFICIENCY VIRUS
ALTEVIPL

SEQ ID NO: 1667 - protein, 8 aa, HUMAN IMMUNODEFICIENCY VIRUS
LTDIVPLT

SEQ ID NO: 1668 - protein, 8 aa, HUMAN IMMUNODEFICIENCY VIRUS
LTEVIPLT

SEQ ID NO: 1669 - protein, 8 aa, HUMAN IMMUNODEFICIENCY VIRUS
IVPLTEEA

SEQ ID NO: 1670 - protein, 8 aa, HUMAN IMMUNODEFICIENCY VIRUS
VIPLTEEA

SEQ ID NO: 1671 - protein, 8 aa, HUMAN IMMUNODEFICIENCY VIRUS
PLTEEAEL

SEQ ID NO: 1672 - protein, 8 aa, HUMAN IMMUNODEFICIENCY VIRUS
ELAENREI

SEQ ID NO: 1673 - protein, 8 aa, HUMAN IMMUNODEFICIENCY VIRUS
LAENREIL

SEQ ID NO: 1674 - protein, 8 aa, HUMAN IMMUNODEFICIENCY VIRUS
KQGQDQWT

SEQ ID NO: 1675 - protein, 8 aa, HUMAN IMMUNODEFICIENCY VIRUS
KQGQGQWT

SEQ ID NO: 1676 - protein, 8 aa, HUMAN IMMUNODEFICIENCY VIRUS
YQEPFKNL

SEQ ID NO: 1677 - protein, 8 aa, HUMAN IMMUNODEFICIENCY VIRUS
NLKTGKYA

SEQ ID NO: 1678 - protein, 8 aa, HUMAN IMMUNODEFICIENCY VIRUS
KTGKYAKM

SEQ ID NO: 1679 - protein, 8 aa, HUMAN IMMUNODEFICIENCY VIRUS
KTGKYARM

SEQ ID NO: 1680 - protein, 8 aa, HUMAN IMMUNODEFICIENCY VIRUS
RTAHTNDV

SEQ ID NO: 1681 - protein, 8 aa, HUMAN IMMUNODEFICIENCY VIRUS
HTNDVKQL

SEQ ID NO: 1682 - protein, 8 aa, HUMAN IMMUNODEFICIENCY VIRUS
DVKQLTEA

SEQ ID NO: 1683 - protein, 8 aa, HUMAN IMMUNODEFICIENCY VIRUS
LTEAVQKI

SEQ ID NO: 1684 - protein, 8 aa, HUMAN IMMUNODEFICIENCY VIRUS
EAVQKIAT

SEQ ID NO: 1685 - protein, 8 aa, HUMAN IMMUNODEFICIENCY VIRUS
KIATESIV

SEQ ID NO: 1686 - protein, 8 aa, HUMAN IMMUNODEFICIENCY VIRUS
IATESIVI

SEQ ID NO: 1687 - protein, 8 aa, HUMAN IMMUNODEFICIENCY VIRUS
SIVIWGKT

SEQ ID NO: 1688 - protein, 8 aa, HUMAN IMMUNODEFICIENCY VIRUS
KLPIQKET

SEQ ID NO: 1689 - protein, 8 aa, HUMAN IMMUNODEFICIENCY VIRUS
RLPIQKET

SEQ ID NO: 1690 - protein, 8 aa, HUMAN IMMUNODEFICIENCY VIRUS
IQKETWEA

SEQ ID NO: 1691 - protein, 8 aa, HUMAN IMMUNODEFICIENCY VIRUS
IQKETWET

SEQ ID NO: 1692 - protein, 8 aa, HUMAN IMMUNODEFICIENCY VIRUS
ETWEAWWT

SEQ ID NO: 1693 - protein, 8 aa, HUMAN IMMUNODEFICIENCY VIRUS
ETWETWWT

SEQ ID NO: 1694 - protein, 8 aa, HUMAN IMMUNODEFICIENCY VIRUS
WTDYWQAT

SEQ ID NO: 1695 - protein, 8 aa, HUMAN IMMUNODEFICIENCY VIRUS
WTEYWQAT

SEQ ID NO: 1696 - protein, 8 aa, HUMAN IMMUNODEFICIENCY VIRUS
WIPEWEFV

SEQ ID NO: 1697 - protein, 8 aa, HUMAN IMMUNODEFICIENCY VIRUS
FVNTPPLV

SEQ ID NO: 1698 - protein, 8 aa, HUMAN IMMUNODEFICIENCY VIRUS
NTPPLVKL

SEQ ID NO: 1699 - protein, 8 aa, HUMAN IMMUNODEFICIENCY VIRUS
LVKLWYQL

SEQ ID NO: 1700 - protein, 8 aa, HUMAN IMMUNODEFICIENCY VIRUS
KLWYQLET

SEQ ID NO: 1701 - protein, 8 aa, HUMAN IMMUNODEFICIENCY VIRUS
YQLEKDPI

SEQ ID NO: 1702 - protein, 8 aa, HUMAN IMMUNODEFICIENCY VIRUS
YQLEKEPI

SEQ ID NO: 1703 - protein, 8 aa, HUMAN IMMUNODEFICIENCY VIRUS
YQLETEPI

SEQ ID NO: 1704 - protein, 8 aa, HUMAN IMMUNODEFICIENCY VIRUS
QLEKEPIV

SEQ ID NO: 1705 - protein, 8 aa, HUMAN IMMUNODEFICIENCY VIRUS
ETFYVDGA

SEQ ID NO: 1706 - protein, 8 aa, HUMAN IMMUNODEFICIENCY VIRUS
AANRETKL

SEQ ID NO: 1707 - protein, 8 aa, HUMAN IMMUNODEFICIENCY VIRUS
KLGKAGYV

SEQ ID NO: 1708 - protein, 8 aa, HUMAN IMMUNODEFICIENCY VIRUS
RQKVVSLT

SEQ ID NO: 1709 - protein, 8 aa, HUMAN IMMUNODEFICIENCY VIRUS
KVVSLTET

SEQ ID NO: 1710 - protein, 8 aa, HUMAN IMMUNODEFICIENCY VIRUS
VVSLTDTT

SEQ ID NO: 1711 - protein, 8 aa, HUMAN IMMUNODEFICIENCY VIRUS
VVSLTETT

SEQ ID NO: 1712 - protein, 8 aa, HUMAN IMMUNODEFICIENCY VIRUS
TTNQKTEL

SEQ ID NO: 1713 - protein, 8 aa, HUMAN IMMUNODEFICIENCY VIRUS
NQKTELHA

SEQ ID NO: 1714 - protein, 8 aa, HUMAN IMMUNODEFICIENCY VIRUS
NQKTELQA

SEQ ID NO: 1715 - protein, 8 aa, HUMAN IMMUNODEFICIENCY VIRUS
ELQAIHLA

SEQ ID NO: 1716 - protein, 8 aa, HUMAN IMMUNODEFICIENCY VIRUS
ELQAIYLA

SEQ ID NO: 1717 - protein, 8 aa, HUMAN IMMUNODEFICIENCY VIRUS
LQAIHLAL

SEQ ID NO: 1718 - protein, 8 aa, HUMAN IMMUNODEFICIENCY VIRUS
LQAIYLAL

SEQ ID NO: 1719 - protein, 8 aa, HUMAN IMMUNODEFICIENCY VIRUS
LALQDSGL

SEQ ID NO: 1720 - protein, 8 aa, HUMAN IMMUNODEFICIENCY VIRUS
LQDSGLEV

SEQ ID NO: 1721 - protein, 8 aa, HUMAN IMMUNODEFICIENCY VIRUS
LQDSGSEV

SEQ ID NO: 1722 - protein, 8 aa, HUMAN IMMUNODEFICIENCY VIRUS
GLEVNIVT

SEQ ID NO: 1723 - protein, 8 aa, HUMAN IMMUNODEFICIENCY VIRUS
IVTDSQYA

SEQ ID NO: 1724 - protein, 8 aa, HUMAN IMMUNODEFICIENCY VIRUS
VTDSQYAL

SEQ ID NO: 1725 - protein, 8 aa, HUMAN IMMUNODEFICIENCY VIRUS
SQYALGII

SEQ ID NO: 1726 - protein, 8 aa, HUMAN IMMUNODEFICIENCY VIRUS
YALGIIQA

SEQ ID NO: 1727 - protein, 8 aa, HUMAN IMMUNODEFICIENCY VIRUS
NQIIEQLI

SEQ ID NO: 1728 - protein, 8 aa, HUMAN IMMUNODEFICIENCY VIRUS
SQIIEQLI

SEQ ID NO: 1729 - protein, 8 aa, HUMAN IMMUNODEFICIENCY VIRUS
QLIKKEKV

SEQ ID NO: 1730 - protein, 8 aa, HUMAN IMMUNODEFICIENCY VIRUS
WVPAHKGI

SEQ ID NO: 1731 - protein, 8 aa, HUMAN IMMUNODEFICIENCY VIRUS
GIGGNEQV

SEQ ID NO: 1732 - protein, 8 aa, HUMAN IMMUNODEFICIENCY VIRUS
QVDKLVSA

SEQ ID NO: 1733 - protein, 8 aa, HUMAN IMMUNODEFICIENCY VIRUS
SAGIRKVL

SEQ ID NO: 1734 - protein, 8 aa, HUMAN IMMUNODEFICIENCY VIRUS
GIRKVLFL

SEQ ID NO: 1735 - protein, 8 aa, HUMAN IMMUNODEFICIENCY VIRUS
KVLFLDGI

SEQ ID NO: 1736 - protein, 8 aa, HUMAN IMMUNODEFICIENCY VIRUS
FLDGIDKA

SEQ ID NO: 1737 - protein, 8 aa, HUMAN IMMUNODEFICIENCY VIRUS
AMASDFNL

SEQ ID NO: 1738 - protein, 8 aa, HUMAN IMMUNODEFICIENCY VIRUS
PIVAKEIV

SEQ ID NO: 1739 - protein, 8 aa, HUMAN IMMUNODEFICIENCY VIRUS
PVVAKEIV

SEQ ID NO: 1740 - protein, 8 aa, HUMAN IMMUNODEFICIENCY VIRUS
IVAKEIVA

SEQ ID NO: 1741 - protein, 8 aa, HUMAN IMMUNODEFICIENCY VIRUS
VVAKEIVA

SEQ ID NO: 1742 - protein, 8 aa, HUMAN IMMUNODEFICIENCY VIRUS
CQLKGEAM

SEQ ID NO: 1743 - protein, 8 aa, HUMAN IMMUNODEFICIENCY VIRUS
QVDCSPGI

SEQ ID NO: 1744 - protein, 8 aa, HUMAN IMMUNODEFICIENCY VIRUS
GIWQLDCT

SEQ ID NO: 1745 - protein, 8 aa, HUMAN IMMUNODEFICIENCY VIRUS
WQLDCTHL

SEQ ID NO: 1746 - protein, 8 aa, HUMAN IMMUNODEFICIENCY VIRUS
CTHLEGKI

SEQ ID NO: 1747 - protein, 8 aa, HUMAN IMMUNODEFICIENCY VIRUS
CTHLEGKV

SEQ ID NO: 1748 - protein, 8 aa, HUMAN IMMUNODEFICIENCY VIRUS
HLEGKIIL

SEQ ID NO: 1749 - protein, 8 aa, HUMAN IMMUNODEFICIENCY VIRUS
HLEGKVIL

SEQ ID NO: 1750 - protein, 8 aa, HUMAN IMMUNODEFICIENCY VIRUS
IILVAVHV

SEQ ID NO: 1751 - protein, 8 aa, HUMAN IMMUNODEFICIENCY VIRUS
VILVAVHV

SEQ ID NO: 1752 - protein, 8 aa, HUMAN IMMUNODEFICIENCY VIRUS
ILVAVHVA

SEQ ID NO: 1753 - protein, 8 aa, HUMAN IMMUNODEFICIENCY VIRUS
VASGYIEA

SEQ ID NO: 1754 - protein, 8 aa, HUMAN IMMUNODEFICIENCY VIRUS
PAETGQET

SEQ ID NO: 1755 - protein, 8 aa, HUMAN IMMUNODEFICIENCY VIRUS
GQETAYFI

SEQ ID NO: 1756 - protein, 8 aa, HUMAN IMMUNODEFICIENCY VIRUS
GQETAYFL

SEQ ID NO: 1757 - protein, 8 aa, HUMAN IMMUNODEFICIENCY VIRUS
TAYFILKL

SEQ ID NO: 1758 - protein, 8 aa, HUMAN IMMUNODEFICIENCY VIRUS
TAYFLLKL

SEQ ID NO: 1759 - protein, 8 aa, HUMAN IMMUNODEFICIENCY VIRUS
KLAGRWPV

SEQ ID NO: 1760 - protein, 8 aa, HUMAN IMMUNODEFICIENCY VIRUS
FTSAAVKA

SEQ ID NO: 1761 - protein, 8 aa, HUMAN IMMUNODEFICIENCY VIRUS
FTSTTVKA

SEQ ID NO: 1762 - protein, 8 aa, HUMAN IMMUNODEFICIENCY VIRUS
AACWWAGI

SEQ ID NO: 1763 - protein, 8 aa, HUMAN IMMUNODEFICIENCY VIRUS
GIKQEFGI

SEQ ID NO: 1764 - protein, 8 aa, HUMAN IMMUNODEFICIENCY VIRUS
GIQQEFGI

SEQ ID NO: 1765 - protein, 8 aa, HUMAN IMMUNODEFICIENCY VIRUS
SQGVVESM

SEQ ID NO: 1766 - protein, 8 aa, HUMAN IMMUNODEFICIENCY VIRUS
DQAEHLKT

SEQ ID NO: 1767 - protein, 8 aa, HUMAN IMMUNODEFICIENCY VIRUS
EQAEHLKT

SEQ ID NO: 1768 - protein, 8 aa, HUMAN IMMUNODEFICIENCY VIRUS
QAEHLKTA

SEQ ID NO: 1769 - protein, 8 aa, HUMAN IMMUNODEFICIENCY VIRUS
HLKTAVQM

SEQ ID NO: 1770 - protein, 8 aa, HUMAN IMMUNODEFICIENCY VIRUS
KTAVQMAV

SEQ ID NO: 1771 - protein, 8 aa, HUMAN IMMUNODEFICIENCY VIRUS
AVQMAVFI

SEQ ID NO: 1772 - protein, 8 aa, HUMAN IMMUNODEFICIENCY VIRUS
RIIDIIAT

SEQ ID NO: 1773 - protein, 8 aa, HUMAN IMMUNODEFICIENCY VIRUS
RIVDIIAT

SEQ ID NO: 1774 - protein, 8 aa, HUMAN IMMUNODEFICIENCY VIRUS
IIASDIQT

SEQ ID NO: 1775 - protein, 8 aa, HUMAN IMMUNODEFICIENCY VIRUS
IIATDIQT

SEQ ID NO: 1776 - protein, 8 aa, HUMAN IMMUNODEFICIENCY VIRUS
LQKQIIKI

SEQ ID NO: 1777 - protein, 8 aa, HUMAN IMMUNODEFICIENCY VIRUS
LQKQITKI

SEQ ID NO: 1778 - protein, 8 aa, HUMAN IMMUNODEFICIENCY VIRUS
LLWKGEGA

SEQ ID NO: 1779 - protein, 8 aa, HUMAN IMMUNODEFICIENCY VIRUS
VIQDNSDI

SEQ ID NO: 1780 - protein, 8 aa, HUMAN IMMUNODEFICIENCY VIRUS
VIQDNSEI

SEQ ID NO: 1781 - protein, 8 aa, HUMAN IMMUNODEFICIENCY VIRUS
KVVPRRKA

SEQ ID NO: 1782 - protein, 8 aa, HUMAN IMMUNODEFICIENCY VIRUS
KVVPRRKV

SEQ ID NO: 1783 - protein, 8 aa, HUMAN IMMUNODEFICIENCY VIRUS
QMAGDDCV

SEQ ID NO: 1784 - protein, 8 aa, HUMAN IMMUNODEFICIENCY VIRUS
MAGDDCVA

SEQ ID NO: 1785 - protein, 9 aa, HUMAN IMMUNODEFICIENCY VIRUS
NLAFPQGEA

SEQ ID NO: 1786 - protein, 9 aa, HUMAN IMMUNODEFICIENCY VIRUS
NLAFQQGEA

SEQ ID NO: 1787 - protein, 9 aa, HUMAN IMMUNODEFICIENCY VIRUS
EQTRANSPT

SEQ ID NO: 1788 - protein, 9 aa, HUMAN IMMUNODEFICIENCY VIRUS
SQTRANSPT

SEQ ID NO: 1789 - protein, 9 aa, HUMAN IMMUNODEFICIENCY VIRUS
QTRANSPTT

SEQ ID NO: 1790 - protein, 9 aa, HUMAN IMMUNODEFICIENCY VIRUS
EAGADRQGT

SEQ ID NO: 1791 - protein, 9 aa, HUMAN IMMUNODEFICIENCY VIRUS
GQRQGTVSL

SEQ ID NO: 1792 - protein, 9 aa, HUMAN IMMUNODEFICIENCY VIRUS
GTTLNFPQI

SEQ ID NO: 1793 - protein, 9 aa, HUMAN IMMUNODEFICIENCY VIRUS
AISLSLPQI

SEQ ID NO: 1794 - protein, 9 aa, HUMAN IMMUNODEFICIENCY VIRUS
GTLNCPQIT

SEQ ID NO: 1795 - protein, 9 aa, HUMAN IMMUNODEFICIENCY VIRUS
PTFNFPQIT

SEQ ID NO: 1796 - protein, 9 aa, HUMAN IMMUNODEFICIENCY VIRUS
QITLWQRPL

SEQ ID NO: 1797 - protein, 9 aa, HUMAN IMMUNODEFICIENCY VIRUS
ITLWQRPLV

SEQ ID NO: 1798 - protein, 9 aa, HUMAN IMMUNODEFICIENCY VIRUS
TLWQRPLVT

SEQ ID NO: 1799 - protein, 9 aa, HUMAN IMMUNODEFICIENCY VIRUS
VTIKIGGQL

SEQ ID NO: 1800 - protein, 9 aa, HUMAN IMMUNODEFICIENCY VIRUS
VTVKIGGQL

SEQ ID NO: 1801 - protein, 9 aa, HUMAN IMMUNODEFICIENCY VIRUS
KIGGQLKEA

SEQ ID NO: 1802 - protein, 9 aa, HUMAN IMMUNODEFICIENCY VIRUS
QLIEALLDT

SEQ ID NO: 1803 - protein, 9 aa, HUMAN IMMUNODEFICIENCY VIRUS
QLKEALLDT

SEQ ID NO: 1804 - protein, 9 aa, HUMAN IMMUNODEFICIENCY VIRUS
LLDTGADDT

SEQ ID NO: 1805 - protein, 9 aa, HUMAN IMMUNODEFICIENCY VIRUS
DTGADDTVL

SEQ ID NO: 1806 - protein, 9 aa, HUMAN IMMUNODEFICIENCY VIRUS
DTVLEDINL

SEQ ID NO: 1807 - protein, 9 aa, HUMAN IMMUNODEFICIENCY VIRUS
DTVLEEINL

SEQ ID NO: 1808 - protein, 9 aa, HUMAN IMMUNODEFICIENCY VIRUS
MIGGIGGFI

SEQ ID NO: 1809 - protein, 9 aa, HUMAN IMMUNODEFICIENCY VIRUS
KVRQYDQIL

SEQ ID NO: 1810 - protein, 9 aa, HUMAN IMMUNODEFICIENCY VIRUS
LIEICGHKA

SEQ ID NO: 1811 - protein, 9 aa, HUMAN IMMUNODEFICIENCY VIRUS
LIEICGKKA

SEQ ID NO: 1812 - protein, 9 aa, HUMAN IMMUNODEFICIENCY VIRUS
TVLVGPTPV

SEQ ID NO: 1813 - protein, 9 aa, HUMAN IMMUNODEFICIENCY VIRUS
LVGPTPVNI

SEQ ID NO: 1814 - protein, 9 aa, HUMAN IMMUNODEFICIENCY VIRUS
PVNIIGRNL

SEQ ID NO: 1815 - protein, 9 aa, HUMAN IMMUNODEFICIENCY VIRUS
PVNIIGRNM

SEQ ID NO: 1816 - protein, 9 aa, HUMAN IMMUNODEFICIENCY VIRUS
NIIGRNLLT

SEQ ID NO: 1817 - protein, 9 aa, HUMAN IMMUNODEFICIENCY VIRUS
NIIGRNMLT

SEQ ID NO: 1818 - protein, 9 aa, HUMAN IMMUNODEFICIENCY VIRUS
NLLTQIGCT

SEQ ID NO: 1819 - protein, 9 aa, HUMAN IMMUNODEFICIENCY VIRUS
NMLTQIGCT

SEQ ID NO: 1820 - protein, 9 aa, HUMAN IMMUNODEFICIENCY VIRUS
NMLTQLGCT

SEQ ID NO: 1821 - protein, 9 aa, HUMAN IMMUNODEFICIENCY VIRUS
LLTQIGCTL

SEQ ID NO: 1822 - protein, 9 aa, HUMAN IMMUNODEFICIENCY VIRUS
MLTQIGCTL

SEQ ID NO: 1823 - protein, 9 aa, HUMAN IMMUNODEFICIENCY VIRUS
MLTQLGCTL

SEQ ID NO: 1824 - protein, 9 aa, HUMAN IMMUNODEFICIENCY VIRUS
TLNFPISPI

SEQ ID NO: 1825 - protein, 9 aa, HUMAN IMMUNODEFICIENCY VIRUS
PIETVPVKL

SEQ ID NO: 1826 - protein, 9 aa, HUMAN IMMUNODEFICIENCY VIRUS
PLTEEKIKA

SEQ ID NO: 1827 - protein, 9 aa, HUMAN IMMUNODEFICIENCY VIRUS
LTEEKIKAL

SEQ ID NO: 1828 - protein, 9 aa, HUMAN IMMUNODEFICIENCY VIRUS
ALVEICTEM

SEQ ID NO: 1829 - protein, 9 aa, HUMAN IMMUNODEFICIENCY VIRUS
FAIKKKDST

SEQ ID NO: 1830 - protein, 9 aa, HUMAN IMMUNODEFICIENCY VIRUS
TQDFWEVQL

SEQ ID NO: 1831 - protein, 9 aa, HUMAN IMMUNODEFICIENCY VIRUS
VQLGIPHPA

SEQ ID NO: 1832 - protein, 9 aa, HUMAN IMMUNODEFICIENCY VIRUS
GLKKKKSVT

SEQ ID NO: 1833 - protein, 9 aa, HUMAN IMMUNODEFICIENCY VIRUS
VTVLDVGDA

SEQ ID NO: 1834 - protein, 9 aa, HUMAN IMMUNODEFICIENCY VIRUS
DVGDAYFSV

SEQ ID NO: 1835 - protein, 9 aa, HUMAN IMMUNODEFICIENCY VIRUS
YTAFTIPSI

SEQ ID NO: 1836 - protein, 9 aa, HUMAN IMMUNODEFICIENCY VIRUS
YTAFTIPST

SEQ ID NO: 1837 - protein, 9 aa, HUMAN IMMUNODEFICIENCY VIRUS
TIPSINNET

SEQ ID NO: 1838 - protein, 9 aa, HUMAN IMMUNODEFICIENCY VIRUS
TIPSTNNET

SEQ ID NO: 1839 - protein, 9 aa, HUMAN IMMUNODEFICIENCY VIRUS
SINNETPGI

SEQ ID NO: 1840 - protein, 9 aa, HUMAN IMMUNODEFICIENCY VIRUS
STNNETPGI

SEQ ID NO: 1841 - protein, 9 aa, HUMAN IMMUNODEFICIENCY VIRUS
GIRYQYNVL

SEQ ID NO: 1842 - protein, 9 aa, HUMAN IMMUNODEFICIENCY VIRUS
PQGWKGSPA

SEQ ID NO: 1843 - protein, 9 aa, HUMAN IMMUNODEFICIENCY VIRUS
PAIFQSSMT

SEQ ID NO: 1844 - protein, 9 aa, HUMAN IMMUNODEFICIENCY VIRUS
FQSSMTKIL

SEQ ID NO: 1845 - protein, 9 aa, HUMAN IMMUNODEFICIENCY VIRUS
VIYQYMDDL

SEQ ID NO: 1846 - protein, 9 aa, HUMAN IMMUNODEFICIENCY VIRUS
YQYMDDLYV

SEQ ID NO: 1847 - protein, 9 aa, HUMAN IMMUNODEFICIENCY VIRUS
DLEIGQHRA

SEQ ID NO: 1848 - protein, 9 aa, HUMAN IMMUNODEFICIENCY VIRUS
DLEIGQHRT

SEQ ID NO: 1849 - protein, 9 aa, HUMAN IMMUNODEFICIENCY VIRUS
EIGQHRAKI

SEQ ID NO: 1850 - protein, 9 aa, HUMAN IMMUNODEFICIENCY VIRUS
EIGQHRTKI

SEQ ID NO: 1851 - protein, 9 aa, HUMAN IMMUNODEFICIENCY VIRUS
KIEELREHL

SEQ ID NO: 1852 - protein, 9 aa, HUMAN IMMUNODEFICIENCY VIRUS
KIEELRQHL

SEQ ID NO: 1853 - protein, 9 aa, HUMAN IMMUNODEFICIENCY VIRUS
HLLKWGFTT

SEQ ID NO: 1854 - protein, 9 aa, HUMAN IMMUNODEFICIENCY VIRUS
HLLRWGFTT

SEQ ID NO: 1855 - protein, 9 aa, HUMAN IMMUNODEFICIENCY VIRUS
ELHPDKWTV

SEQ ID NO: 1856 - protein, 9 aa, HUMAN IMMUNODEFICIENCY VIRUS
QLPEKDSWT

SEQ ID NO: 1857 - protein, 9 aa, HUMAN IMMUNODEFICIENCY VIRUS
VLPEKDSWT

SEQ ID NO: 1858 - protein, 9 aa, HUMAN IMMUNODEFICIENCY VIRUS
WTVNDIQKL

SEQ ID NO: 1859 - protein, 9 aa, HUMAN IMMUNODEFICIENCY VIRUS
TVNDIQKLV

SEQ ID NO: 1860 - protein, 9 aa, HUMAN IMMUNODEFICIENCY VIRUS
DIQKLVGKL

SEQ ID NO: 1861 - protein, 9 aa, HUMAN IMMUNODEFICIENCY VIRUS
KLVGKLNWA

SEQ ID NO: 1862 - protein, 9 aa, HUMAN IMMUNODEFICIENCY VIRUS
WASQIYAGI

SEQ ID NO: 1863 - protein, 9 aa, HUMAN IMMUNODEFICIENCY VIRUS
WASQIYPGI

SEQ ID NO: 1864 - protein, 9 aa, HUMAN IMMUNODEFICIENCY VIRUS
SQIYAGIKV

SEQ ID NO: 1865 - protein, 9 aa, HUMAN IMMUNODEFICIENCY VIRUS
SQIYPGIKV

SEQ ID NO: 1866 - protein, 9 aa, HUMAN IMMUNODEFICIENCY VIRUS
YAGIKVKQL

SEQ ID NO: 1867 - protein, 9 aa, HUMAN IMMUNODEFICIENCY VIRUS
KVKQLCKLL

SEQ ID NO: 1868 - protein, 9 aa, HUMAN IMMUNODEFICIENCY VIRUS
KVRQLCKLL

SEQ ID NO: 1869 - protein, 9 aa, HUMAN IMMUNODEFICIENCY VIRUS
QLCKLLRGA

SEQ ID NO: 1870 - protein, 9 aa, HUMAN IMMUNODEFICIENCY VIRUS
QLCKLLRGT

SEQ ID NO: 1871 - protein, 9 aa, HUMAN IMMUNODEFICIENCY VIRUS
KLLRGAKAL

SEQ ID NO: 1872 - protein, 9 aa, HUMAN IMMUNODEFICIENCY VIRUS
KLLRGTKAL

SEQ ID NO: 1873 - protein, 9 aa, HUMAN IMMUNODEFICIENCY VIRUS
LLRGAKALT

SEQ ID NO: 1874 - protein, 9 aa, HUMAN IMMUNODEFICIENCY VIRUS
LLRGTKALT

SEQ ID NO: 1875 - protein, 9 aa, HUMAN IMMUNODEFICIENCY VIRUS
GAKALTDIV

SEQ ID NO: 1876 - protein, 9 aa, HUMAN IMMUNODEFICIENCY VIRUS
GTKALTEVI

SEQ ID NO: 1877 - protein, 9 aa, HUMAN IMMUNODEFICIENCY VIRUS
KALTDIVPL

SEQ ID NO: 1878 - protein, 9 aa, HUMAN IMMUNODEFICIENCY VIRUS
KALTEVIPL

SEQ ID NO: 1879 - protein, 9 aa, HUMAN IMMUNODEFICIENCY VIRUS
ALTDIVPLT

SEQ ID NO: 1880 - protein, 9 aa, HUMAN IMMUNODEFICIENCY VIRUS
ALTEVIPLT

SEQ ID NO: 1881 - protein, 9 aa, HUMAN IMMUNODEFICIENCY VIRUS
DIVPLTEEA

SEQ ID NO: 1882 - protein, 9 aa, HUMAN IMMUNODEFICIENCY VIRUS
EVIPLTEEA

SEQ ID NO: 1883 - protein, 9 aa, HUMAN IMMUNODEFICIENCY VIRUS
LTEEAELEL

SEQ ID NO: 1884 - protein, 9 aa, HUMAN IMMUNODEFICIENCY VIRUS
ELAENREIL

SEQ ID NO: 1885 - protein, 9 aa, HUMAN IMMUNODEFICIENCY VIRUS
ILKEPVHGV

SEQ ID NO: 1886 - protein, 9 aa, HUMAN IMMUNODEFICIENCY VIRUS
GQDQWTYQI

SEQ ID NO: 1887 - protein, 9 aa, HUMAN IMMUNODEFICIENCY VIRUS
GQGQWTYQI

SEQ ID NO: 1888 - protein, 9 aa, HUMAN IMMUNODEFICIENCY VIRUS
YAKMRTAHT

SEQ ID NO: 1889 - protein, 9 aa, HUMAN IMMUNODEFICIENCY VIRUS
YARMRGAHT

SEQ ID NO: 1890 - protein, 9 aa, HUMAN IMMUNODEFICIENCY VIRUS
HTNDVKQLT

SEQ ID NO: 1891 - protein, 9 aa, HUMAN IMMUNODEFICIENCY VIRUS
DVKQLTEAV

SEQ ID NO: 1892 - protein, 9 aa, HUMAN IMMUNODEFICIENCY VIRUS
QLTEAVQKI

SEQ ID NO: 1893 - protein, 9 aa, HUMAN IMMUNODEFICIENCY VIRUS
LTEAVQKIA

SEQ ID NO: 1894 - protein, 9 aa, HUMAN IMMUNODEFICIENCY VIRUS
VQKIATESI

SEQ ID NO: 1895 - protein, 9 aa, HUMAN IMMUNODEFICIENCY VIRUS
KIATESIVI

SEQ ID NO: 1896 - protein, 9 aa, HUMAN IMMUNODEFICIENCY VIRUS
KTPKFKLPI

SEQ ID NO: 1897 - protein, 9 aa, HUMAN IMMUNODEFICIENCY VIRUS
KTPKFRLPI

SEQ ID NO: 1898 - protein, 9 aa, HUMAN IMMUNODEFICIENCY VIRUS
PIQKETWEA

SEQ ID NO: 1899 - protein, 9 aa, HUMAN IMMUNODEFICIENCY VIRUS
PIQKETWET

SEQ ID NO: 1900 - protein, 9 aa, HUMAN IMMUNODEFICIENCY VIRUS
PLVKLWYQL

SEQ ID NO: 1901 - protein, 9 aa, HUMAN IMMUNODEFICIENCY VIRUS
YQLEKEPIV

SEQ ID NO: 1902 - protein, 9 aa, HUMAN IMMUNODEFICIENCY VIRUS
IVGAETFYV

SEQ ID NO: 1903 - protein, 9 aa, HUMAN IMMUNODEFICIENCY VIRUS
ETFYVDGAA

SEQ ID NO: 1904 - protein, 9 aa, HUMAN IMMUNODEFICIENCY VIRUS
GAANRETKL

SEQ ID NO: 1905 - protein, 9 aa, HUMAN IMMUNODEFICIENCY VIRUS
KLGKAGYVT

SEQ ID NO: 1906 - protein, 9 aa, HUMAN IMMUNODEFICIENCY VIRUS
VTDRGRQKV

SEQ ID NO: 1907 - protein, 9 aa, HUMAN IMMUNODEFICIENCY VIRUS
KVVSLTETT

SEQ ID NO: 1908 - protein, 9 aa, HUMAN IMMUNODEFICIENCY VIRUS
LTDTTNQKT

SEQ ID NO: 1909 - protein, 9 aa, HUMAN IMMUNODEFICIENCY VIRUS
LTETTNQKT

SEQ ID NO: 1910 - protein, 9 aa, HUMAN IMMUNODEFICIENCY VIRUS
DTTNQKTEL

SEQ ID NO: 1911 - protein, 9 aa, HUMAN IMMUNODEFICIENCY VIRUS
ETTNQKTEL

SEQ ID NO: 1912 - protein, 9 aa, HUMAN IMMUNODEFICIENCY VIRUS
NQKTELHAI

SEQ ID NO: 1913 - protein, 9 aa, HUMAN IMMUNODEFICIENCY VIRUS
NQKTELQAI

SEQ ID NO: 1914 - protein, 9 aa, HUMAN IMMUNODEFICIENCY VIRUS
KTELQAIHL

SEQ ID NO: 1915 - protein, 9 aa, HUMAN IMMUNODEFICIENCY VIRUS
KTELQAIYL

SEQ ID NO: 1916 - protein, 9 aa, HUMAN IMMUNODEFICIENCY VIRUS
ELQAIHLAL

SEQ ID NO: 1917 - protein, 9 aa, HUMAN IMMUNODEFICIENCY VIRUS
ELQAIYLAL

SEQ ID NO: 1918 - protein, 9 aa, HUMAN IMMUNODEFICIENCY VIRUS
HLALQDSGL

SEQ ID NO: 1919 - protein, 9 aa, HUMAN IMMUNODEFICIENCY VIRUS
ALQDSGLEV

SEQ ID NO: 1920 - protein, 9 aa, HUMAN IMMUNODEFICIENCY VIRUS
ALQDSGSEV

SEQ ID NO: 1921 - protein, 9 aa, HUMAN IMMUNODEFICIENCY VIRUS
NIVTDSQYA

SEQ ID NO: 1922 - protein, 9 aa, HUMAN IMMUNODEFICIENCY VIRUS
IVTDSQYAL

SEQ ID NO: 1923 - protein, 9 aa, HUMAN IMMUNODEFICIENCY VIRUS
LVNQIIEQL

SEQ ID NO: 1924 - protein, 9 aa, HUMAN IMMUNODEFICIENCY VIRUS
LVSQIIEQL

SEQ ID NO: 1925 - protein, 9 aa, HUMAN IMMUNODEFICIENCY VIRUS
EQLIKKEKV

SEQ ID NO: 1926 - protein, 9 aa, HUMAN IMMUNODEFICIENCY VIRUS
LIKKEKVYL

SEQ ID NO: 1927 - protein, 9 aa, HUMAN IMMUNODEFICIENCY VIRUS
KVYLAWVPA

SEQ ID NO: 1928 - protein, 9 aa, HUMAN IMMUNODEFICIENCY VIRUS
KVYLSWVPA

SEQ ID NO: 1929 - protein, 9 aa, HUMAN IMMUNODEFICIENCY VIRUS
EQVDKLVSA

SEQ ID NO: 1930 - protein, 9 aa, HUMAN IMMUNODEFICIENCY VIRUS
LVSAGIRKV

SEQ ID NO: 1931 - protein, 9 aa, HUMAN IMMUNODEFICIENCY VIRUS
LVSSGIRKV

SEQ ID NO: 1932 - protein, 9 aa, HUMAN IMMUNODEFICIENCY VIRUS
RAMASDFNL

SEQ ID NO: 1933 - protein, 9 aa, HUMAN IMMUNODEFICIENCY VIRUS
PIVAKEIVA

SEQ ID NO: 1934 - protein, 9 aa, HUMAN IMMUNODEFICIENCY VIRUS
PVVAKEIVA

SEQ ID NO: 1935 - protein, 9 aa, HUMAN IMMUNODEFICIENCY VIRUS
VASCDKCQL

SEQ ID NO: 1936 - protein, 9 aa, HUMAN IMMUNODEFICIENCY VIRUS
GQVDCSPGI

SEQ ID NO: 1937 - protein, 9 aa, HUMAN IMMUNODEFICIENCY VIRUS
CTHLEGKII

SEQ ID NO: 1938 - protein, 9 aa, HUMAN IMMUNODEFICIENCY VIRUS
CTHLEGKVI

SEQ ID NO: 1939 - protein, 9 aa, HUMAN IMMUNODEFICIENCY VIRUS
HLEGKIILV

SEQ ID NO: 1940 - protein, 9 aa, HUMAN IMMUNODEFICIENCY VIRUS
HLEGKVILV

SEQ ID NO: 1941 - protein, 9 aa, HUMAN IMMUNODEFICIENCY VIRUS
KIILVAVHV

SEQ ID NO: 1942 - protein, 9 aa, HUMAN IMMUNODEFICIENCY VIRUS
KVILVAVHV

SEQ ID NO: 1943 - protein, 9 aa, HUMAN IMMUNODEFICIENCY VIRUS
IILVAVHVA

SEQ ID NO: 1944 - protein, 9 aa, HUMAN IMMUNODEFICIENCY VIRUS
VILVAVHVA

SEQ ID NO: 1945 - protein, 9 aa, HUMAN IMMUNODEFICIENCY VIRUS
AVHVASGYI

SEQ ID NO: 1946 - protein, 9 aa, HUMAN IMMUNODEFICIENCY VIRUS
HVASGYIEA

SEQ ID NO: 1947 - protein, 9 aa, HUMAN IMMUNODEFICIENCY VIRUS
YIEAEVIPA

SEQ ID NO: 1948 - protein, 9 aa, HUMAN IMMUNODEFICIENCY VIRUS
EAEVIPAET

SEQ ID NO: 1949 - protein, 9 aa, HUMAN IMMUNODEFICIENCY VIRUS
PAETGQETA

SEQ ID NO: 1950 - protein, 9 aa, HUMAN IMMUNODEFICIENCY VIRUS
GQETAYFIL

SEQ ID NO: 1951 - protein, 9 aa, HUMAN IMMUNODEFICIENCY VIRUS
GQETAYFLL

SEQ ID NO: 1952 - protein, 9 aa, HUMAN IMMUNODEFICIENCY VIRUS
ETAYFILKL

SEQ ID NO: 1953 - protein, 9 aa, HUMAN IMMUNODEFICIENCY VIRUS
ETAYFLLKL

SEQ ID NO: 1954 - protein, 9 aa, HUMAN IMMUNODEFICIENCY VIRUS
TAYFILKLA

SEQ ID NO: 1955 - protein, 9 aa, HUMAN IMMUNODEFICIENCY VIRUS
TAYFLLKLA

SEQ ID NO: 1956 - protein, 9 aa, HUMAN IMMUNODEFICIENCY VIRUS
LAGRWPVKT

SEQ ID NO: 1957 - protein, 9 aa, HUMAN IMMUNODEFICIENCY VIRUS
LAGRWPVKV

SEQ ID NO: 1958 - protein, 9 aa, HUMAN IMMUNODEFICIENCY VIRUS
HTDNGSNFT

SEQ ID NO: 1959 - protein, 9 aa, HUMAN IMMUNODEFICIENCY VIRUS
FTSAAVKAA

SEQ ID NO: 1960 - protein, 9 aa, HUMAN IMMUNODEFICIENCY VIRUS
FTSTTVKAA

SEQ ID NO: 1961 - protein, 9 aa, HUMAN IMMUNODEFICIENCY VIRUS
AVKAACWWA

SEQ ID NO: 1962 - protein, 9 aa, HUMAN IMMUNODEFICIENCY VIRUS
TVKAACWWA

SEQ ID NO: 1963 - protein, 9 aa, HUMAN IMMUNODEFICIENCY VIRUS
KAACWWAGI

SEQ ID NO: 1964 - protein, 9 aa, HUMAN IMMUNODEFICIENCY VIRUS
VVESMNKEL

SEQ ID NO: 1965 - protein, 9 aa, HUMAN IMMUNODEFICIENCY VIRUS
SMNKELKKI

SEQ ID NO: 1966 - protein, 9 aa, HUMAN IMMUNODEFICIENCY VIRUS
ELKKIIGQV

SEQ ID NO: 1967 - protein, 9 aa, HUMAN IMMUNODEFICIENCY VIRUS
IIGQVRDQA

SEQ ID NO: 1968 - protein, 9 aa, HUMAN IMMUNODEFICIENCY VIRUS
IIGQVREQA

SEQ ID NO: 1969 - protein, 9 aa, HUMAN IMMUNODEFICIENCY VIRUS
QVRDQAEHL

SEQ ID NO: 1970 - protein, 9 aa, HUMAN IMMUNODEFICIENCY VIRUS
QVREQAEHL

SEQ ID NO: 1971 - protein, 9 aa, HUMAN IMMUNODEFICIENCY VIRUS
DQAEHLKTA

SEQ ID NO: 1972 - protein, 9 aa, HUMAN IMMUNODEFICIENCY VIRUS
EQAEHLKTA

SEQ ID NO: 1973 - protein, 9 aa, HUMAN IMMUNODEFICIENCY VIRUS
QAEHLKTAV

SEQ ID NO: 1974 - protein, 9 aa, HUMAN IMMUNODEFICIENCY VIRUS
HLKTAVQMA

SEQ ID NO: 1975 - protein, 9 aa, HUMAN IMMUNODEFICIENCY VIRUS
TAVQMAVFI

SEQ ID NO: 1976 - protein, 9 aa, HUMAN IMMUNODEFICIENCY VIRUS
SAGERIIDI

SEQ ID NO: 1977 - protein, 9 aa, HUMAN IMMUNODEFICIENCY VIRUS
SAGERIVDI

SEQ ID NO: 1978 - protein, 9 aa, HUMAN IMMUNODEFICIENCY VIRUS
IIDIIASDI

SEQ ID NO: 1979 - protein, 9 aa, HUMAN IMMUNODEFICIENCY VIRUS
IIDIIATDI

SEQ ID NO: 1980 - protein, 9 aa, HUMAN IMMUNODEFICIENCY VIRUS
IVDIIATDI

SEQ ID NO: 1981 - protein, 9 aa, HUMAN IMMUNODEFICIENCY VIRUS
DIIASDIQT

SEQ ID NO: 1982 - protein, 9 aa, HUMAN IMMUNODEFICIENCY VIRUS
DIIATDIQT

SEQ ID NO: 1983 - protein, 9 aa, HUMAN IMMUNODEFICIENCY VIRUS
ATDIQTKEL

SEQ ID NO: 1984 - protein, 9 aa, HUMAN IMMUNODEFICIENCY VIRUS
QTKELQKQI

SEQ ID NO: 1985 - protein, 9 aa, HUMAN IMMUNODEFICIENCY VIRUS
ELQKQIIKI

SEQ ID NO: 1986 - protein, 9 aa, HUMAN IMMUNODEFICIENCY VIRUS
ELQKQITKI

SEQ ID NO: 1987 - protein, 9 aa, HUMAN IMMUNODEFICIENCY VIRUS
IIKIQNFRV

SEQ ID NO: 1988 - protein, 9 aa, HUMAN IMMUNODEFICIENCY VIRUS
ITKIQNFRV

SEQ ID NO: 1989 - protein, 9 aa, HUMAN IMMUNODEFICIENCY VIRUS
PIWKGPAKL

SEQ ID NO: 1990 - protein, 9 aa, HUMAN IMMUNODEFICIENCY VIRUS
PLWKGPAKL

SEQ ID NO: 1991 - protein, 9 aa, HUMAN IMMUNODEFICIENCY VIRUS
KLLWKGEGA

SEQ ID NO: 1992 - protein, 9 aa, HUMAN IMMUNODEFICIENCY VIRUS
LLWKGEGAV

SEQ ID NO: 1993 - protein, 9 aa, HUMAN IMMUNODEFICIENCY VIRUS
VVIQDNSDI

SEQ ID NO: 1994 - protein, 9 aa, HUMAN IMMUNODEFICIENCY VIRUS
VVIQDNSEI

SEQ ID NO: 1995 - protein, 9 aa, HUMAN IMMUNODEFICIENCY VIRUS
IQDNSDIKV

SEQ ID NO: 1996 - protein, 9 aa, HUMAN IMMUNODEFICIENCY VIRUS
IQDNSEIKV

SEQ ID NO: 1997 - protein, 9 aa, HUMAN IMMUNODEFICIENCY VIRUS
VVPRRKAKI

SEQ ID NO: 1998 - protein, 9 aa, HUMAN IMMUNODEFICIENCY VIRUS
VVPRRKVKI

SEQ ID NO: 1999 - protein, 9 aa, HUMAN IMMUNODEFICIENCY VIRUS
IIKDYGKQM

SEQ ID NO: 2000 - protein, 9 aa, HUMAN IMMUNODEFICIENCY VIRUS
IIRDYGKQM

SEQ ID NO: 2001 - protein, 9 aa, HUMAN IMMUNODEFICIENCY VIRUS
KQMAGDDCV

SEQ ID NO: 2002 - protein, 9 aa, HUMAN IMMUNODEFICIENCY VIRUS
QMAGDDCVA

SEQ ID NO: 2003 - protein, 10 aa, HUMAN IMMUNODEFICIENCY VIRUS
KAREFSSEQT

SEQ ID NO: 2004 - protein, 10 aa, HUMAN IMMUNODEFICIENCY VIRUS
RANSPTRREL

SEQ ID NO: 2005 - protein, 10 aa, HUMAN IMMUNODEFICIENCY VIRUS
RANSPTSREL

SEQ ID NO: 2006 - protein, 10 aa, HUMAN IMMUNODEFICIENCY VIRUS
STNSPTSREL

SEQ ID NO: 2007 - protein, 10 aa, HUMAN IMMUNODEFICIENCY VIRUS
SQTRANSPTT

SEQ ID NO: 2008 - protein, 10 aa, HUMAN IMMUNODEFICIENCY VIRUS
RANSPSSREL

SEQ ID NO: 2009 - protein, 10 aa, HUMAN IMMUNODEFICIENCY VIRUS
RANSPTTREL

SEQ ID NO: 2010 - protein, 10 aa, HUMAN IMMUNODEFICIENCY VIRUS
GAISLSLPQI

SEQ ID NO: 2011 - protein, 10 aa, HUMAN IMMUNODEFICIENCY VIRUS
GTTLNFPQIT

SEQ ID NO: 2012 - protein, 10 aa, HUMAN IMMUNODEFICIENCY VIRUS
AISLSLPQIT

SEQ ID NO: 2013 - protein, 10 aa, HUMAN IMMUNODEFICIENCY VIRUS
GTLNCPQITL

SEQ ID NO: 2014 - protein, 10 aa, HUMAN IMMUNODEFICIENCY VIRUS
PTFNFPQITL

SEQ ID NO: 2015 - protein, 10 aa, HUMAN IMMUNODEFICIENCY VIRUS
PQITLWQRPL

SEQ ID NO: 2016 - protein, 10 aa, HUMAN IMMUNODEFICIENCY VIRUS
QITLWQRPLV

SEQ ID NO: 2017 - protein, 10 aa, HUMAN IMMUNODEFICIENCY VIRUS
ITLWQRPLVT

SEQ ID NO: 2018 - protein, 10 aa, HUMAN IMMUNODEFICIENCY VIRUS
TLWQRPLVTI

SEQ ID NO: 2019 - protein, 10 aa, HUMAN IMMUNODEFICIENCY VIRUS
TLWQRPLVTV

SEQ ID NO: 2020 - protein, 10 aa, HUMAN IMMUNODEFICIENCY VIRUS
WQRPLVTIKI

SEQ ID NO: 2021 - protein, 10 aa, HUMAN IMMUNODEFICIENCY VIRUS
WQRPLVTVKI

SEQ ID NO: 2022 - protein, 10 aa, HUMAN IMMUNODEFICIENCY VIRUS
LVTIKIGGQL

SEQ ID NO: 2023 - protein, 10 aa, HUMAN IMMUNODEFICIENCY VIRUS
KIGGQLKEAL

SEQ ID NO: 2024 - protein, 10 aa, HUMAN IMMUNODEFICIENCY VIRUS
GQLIEALLDT

SEQ ID NO: 2025 - protein, 10 aa, HUMAN IMMUNODEFICIENCY VIRUS
GQLKEALLDT

SEQ ID NO: 2026 - protein, 10 aa, HUMAN IMMUNODEFICIENCY VIRUS
LIEALLDTGA

SEQ ID NO: 2027 - protein, 10 aa, HUMAN IMMUNODEFICIENCY VIRUS
ALLDTGADDT

SEQ ID NO: 2028 - protein, 10 aa, HUMAN IMMUNODEFICIENCY VIRUS
LLDTGADDTV

SEQ ID NO: 2029 - protein, 10 aa, HUMAN IMMUNODEFICIENCY VIRUS
GADDTVLEDI

SEQ ID NO: 2030 - protein, 10 aa, HUMAN IMMUNODEFICIENCY VIRUS
GADDTVLEEI

SEQ ID NO: 2031 - protein, 10 aa, HUMAN IMMUNODEFICIENCY VIRUS
GADDTVLEEM

SEQ ID NO: 2032 - protein, 10 aa, HUMAN IMMUNODEFICIENCY VIRUS
NLPGKWKPKM

SEQ ID NO: 2033 - protein, 10 aa, HUMAN IMMUNODEFICIENCY VIRUS
KMIGGIGGFI

SEQ ID NO: 2034 - protein, 10 aa, HUMAN IMMUNODEFICIENCY VIRUS
FIKVRQYDQI

SEQ ID NO: 2035 - protein, 10 aa, HUMAN IMMUNODEFICIENCY VIRUS
KVRQYDQILI

SEQ ID NO: 2036 - protein, 10 aa, HUMAN IMMUNODEFICIENCY VIRUS
KVRQYDQIPI

SEQ ID NO: 2037 - protein, 10 aa, HUMAN IMMUNODEFICIENCY VIRUS
RQYDQILIEI

SEQ ID NO: 2038 - protein, 10 aa, HUMAN IMMUNODEFICIENCY VIRUS
RQYDQIPIEI

SEQ ID NO: 2039 - protein, 10 aa, HUMAN IMMUNODEFICIENCY VIRUS
ILIEICGKKA

SEQ ID NO: 2040 - protein, 10 aa, HUMAN IMMUNODEFICIENCY VIRUS
LIEICGHKAI

SEQ ID NO: 2041 - protein, 10 aa, HUMAN IMMUNODEFICIENCY VIRUS
LIEICGKKAI

SEQ ID NO: 2042 - protein, 10 aa, HUMAN IMMUNODEFICIENCY VIRUS
EICGHKAIGT

SEQ ID NO: 2043 - protein, 10 aa, HUMAN IMMUNODEFICIENCY VIRUS
EICGKKAIGT

SEQ ID NO: 2044 - protein, 10 aa, HUMAN IMMUNODEFICIENCY VIRUS
AIGTVLVGPT

SEQ ID NO: 2045 - protein, 10 aa, HUMAN IMMUNODEFICIENCY VIRUS
GTVLVGPTPV

SEQ ID NO: 2046 - protein, 10 aa, HUMAN IMMUNODEFICIENCY VIRUS
VLVGPTPVNI

SEQ ID NO: 2047 - protein, 10 aa, HUMAN IMMUNODEFICIENCY VIRUS
LVGPTPVNII

SEQ ID NO: 2048 - protein, 10 aa, HUMAN IMMUNODEFICIENCY VIRUS
PVNIIGRNLL

SEQ ID NO: 2049 - protein, 10 aa, HUMAN IMMUNODEFICIENCY VIRUS
PVNIIGRNML

SEQ ID NO: 2050 - protein, 10 aa, HUMAN IMMUNODEFICIENCY VIRUS
IIGRNLLTQI

SEQ ID NO: 2051 - protein, 10 aa, HUMAN IMMUNODEFICIENCY VIRUS
IIGRNMLTQI

SEQ ID NO: 2052 - protein, 10 aa, HUMAN IMMUNODEFICIENCY VIRUS
IIGRNMLTQL

SEQ ID NO: 2053 - protein, 10 aa, HUMAN IMMUNODEFICIENCY VIRUS
NLLTQIGCTL

SEQ ID NO: 2054 - protein, 10 aa, HUMAN IMMUNODEFICIENCY VIRUS
NMLTQIGCTL

SEQ ID NO: 2055 - protein, 10 aa, HUMAN IMMUNODEFICIENCY VIRUS
NMLTQLGCTL

SEQ ID NO: 2056 - protein, 10 aa, HUMAN IMMUNODEFICIENCY VIRUS
QIGCTLNFPI

SEQ ID NO: 2057 - protein, 10 aa, HUMAN IMMUNODEFICIENCY VIRUS
QLGCTLNFPI

SEQ ID NO: 2058 - protein, 10 aa, HUMAN IMMUNODEFICIENCY VIRUS
CTLNFPISPI

SEQ ID NO: 2059 - protein, 10 aa, HUMAN IMMUNODEFICIENCY VIRUS
PISPIETVPV

SEQ ID NO: 2060 - protein, 10 aa, HUMAN IMMUNODEFICIENCY VIRUS
TVPVKLKPGM

SEQ ID NO: 2061 - protein, 10 aa, HUMAN IMMUNODEFICIENCY VIRUS
KQWPLTEEKI

SEQ ID NO: 2062 - protein, 10 aa, HUMAN IMMUNODEFICIENCY VIRUS
PLTEEKIKAL

SEQ ID NO: 2063 - protein, 10 aa, HUMAN IMMUNODEFICIENCY VIRUS
LTEEKIKALT

SEQ ID NO: 2064 - protein, 10 aa, HUMAN IMMUNODEFICIENCY VIRUS
LTEEKIKALV

SEQ ID NO: 2065 - protein, 10 aa, HUMAN IMMUNODEFICIENCY VIRUS
KIKALTEICT

SEQ ID NO: 2066 - protein, 10 aa, HUMAN IMMUNODEFICIENCY VIRUS
KIKALVEICT

SEQ ID NO: 2067 - protein, 10 aa, HUMAN IMMUNODEFICIENCY VIRUS
KALVEICTEM

SEQ ID NO: 2068 - protein, 10 aa, HUMAN IMMUNODEFICIENCY VIRUS
CTEMEKEGKI

SEQ ID NO: 2069 - protein, 10 aa, HUMAN IMMUNODEFICIENCY VIRUS
KIGPENPYNT

SEQ ID NO: 2070 - protein, 10 aa, HUMAN IMMUNODEFICIENCY VIRUS
RIGPENPYNT

SEQ ID NO: 2071 - protein, 10 aa, HUMAN IMMUNODEFICIENCY VIRUS
RTQDFWEVQL

SEQ ID NO: 2072 - protein, 10 aa, HUMAN IMMUNODEFICIENCY VIRUS
EVQLGIPHPA

SEQ ID NO: 2073 - protein, 10 aa, HUMAN IMMUNODEFICIENCY VIRUS
QLGIPHPAGL

SEQ ID NO: 2074 - protein, 10 aa, HUMAN IMMUNODEFICIENCY VIRUS
PAGLKKKKSV

SEQ ID NO: 2075 - protein, 10 aa, HUMAN IMMUNODEFICIENCY VIRUS
GLKKKKSVTV

SEQ ID NO: 2076 - protein, 10 aa, HUMAN IMMUNODEFICIENCY VIRUS
SVTVLDVGDA

SEQ ID NO: 2077 - protein, 10 aa, HUMAN IMMUNODEFICIENCY VIRUS
PLDKDFRKYT

SEQ ID NO: 2078 - protein, 10 aa, HUMAN IMMUNODEFICIENCY VIRUS
FTIPSINNET

SEQ ID NO: 2079 - protein, 10 aa, HUMAN IMMUNODEFICIENCY VIRUS
FTIPSTNNET

SEQ ID NO: 2080 - protein, 10 aa, HUMAN IMMUNODEFICIENCY VIRUS
PQGWKGSPAI

SEQ ID NO: 2081 - protein, 10 aa, HUMAN IMMUNODEFICIENCY VIRUS
AIFQSSMTKI

SEQ ID NO: 2082 - protein, 10 aa, HUMAN IMMUNODEFICIENCY VIRUS
IVIYQYMDDL

SEQ ID NO: 2083 - protein, 10 aa, HUMAN IMMUNODEFICIENCY VIRUS
DLYVGSDLEI

SEQ ID NO: 2084 - protein, 10 aa, HUMAN IMMUNODEFICIENCY VIRUS
GQHRAKIEEL

SEQ ID NO: 2085 - protein, 10 aa, HUMAN IMMUNODEFICIENCY VIRUS
GQHRTKIEEL

SEQ ID NO: 2086 - protein, 10 aa, HUMAN IMMUNODEFICIENCY VIRUS
KIEELREHLL

SEQ ID NO: 2087 - protein, 10 aa, HUMAN IMMUNODEFICIENCY VIRUS
KIEELRQHLL

SEQ ID NO: 2088 - protein, 10 aa, HUMAN IMMUNODEFICIENCY VIRUS
RQHLLRWGFT

SEQ ID NO: 2089 - protein, 10 aa, HUMAN IMMUNODEFICIENCY VIRUS
HQKEPPFLWM

SEQ ID NO: 2090 - protein, 10 aa, HUMAN IMMUNODEFICIENCY VIRUS
IQLPEKDSWT

SEQ ID NO: 2091 - protein, 10 aa, HUMAN IMMUNODEFICIENCY VIRUS
IVLPEKDSWT

SEQ ID NO: 2092 - protein, 10 aa, HUMAN IMMUNODEFICIENCY VIRUS
QLPEKDSWTV

SEQ ID NO: 2093 - protein, 10 aa, HUMAN IMMUNODEFICIENCY VIRUS
VLPEKDSWTV

SEQ ID NO: 2094 - protein, 10 aa, HUMAN IMMUNODEFICIENCY VIRUS
WTVNDIQKLV

SEQ ID NO: 2095 - protein, 10 aa, HUMAN IMMUNODEFICIENCY VIRUS
KLNWASQIYA

SEQ ID NO: 2096 - protein, 10 aa, HUMAN IMMUNODEFICIENCY VIRUS
GIKVKQLCKL

SEQ ID NO: 2097 - protein, 10 aa, HUMAN IMMUNODEFICIENCY VIRUS
GIKVRQLCKL

SEQ ID NO: 2098 - protein, 10 aa, HUMAN IMMUNODEFICIENCY VIRUS
KQLCKLLRGA

SEQ ID NO: 2099 - protein, 10 aa, HUMAN IMMUNODEFICIENCY VIRUS
KQLCKLLRGT

SEQ ID NO: 2100 - protein, 10 aa, HUMAN IMMUNODEFICIENCY VIRUS
RQLCKLLRGA

SEQ ID NO: 2101 - protein, 10 aa, HUMAN IMMUNODEFICIENCY VIRUS
KLLRGAKALT

SEQ ID NO: 2102 - protein, 10 aa, HUMAN IMMUNODEFICIENCY VIRUS
KLLRGTKALT

SEQ ID NO: 2103 - protein, 10 aa, HUMAN IMMUNODEFICIENCY VIRUS
KALTDIVPLT

SEQ ID NO: 2104 - protein, 10 aa, HUMAN IMMUNODEFICIENCY VIRUS
KALTEVIPLT

SEQ ID NO: 2105 - protein, 10 aa, HUMAN IMMUNODEFICIENCY VIRUS
IVPLTEEAEL

SEQ ID NO: 2106 - protein, 10 aa, HUMAN IMMUNODEFICIENCY VIRUS
VIPLTEEAEL

SEQ ID NO: 2107 - protein, 10 aa, HUMAN IMMUNODEFICIENCY VIRUS
PLTEEAELEL

SEQ ID NO: 2108 - protein, 10 aa, HUMAN IMMUNODEFICIENCY VIRUS
LTEEAELELA

SEQ ID NO: 2109 - protein, 10 aa, HUMAN IMMUNODEFICIENCY VIRUS
ELELAENREI

SEQ ID NO: 2110 - protein, 10 aa, HUMAN IMMUNODEFICIENCY VIRUS
EILKEPVHGV

SEQ ID NO: 2111 - protein, 10 aa, HUMAN IMMUNODEFICIENCY VIRUS
GVYYDPSKDL

SEQ ID NO: 2112 - protein, 10 aa, HUMAN IMMUNODEFICIENCY VIRUS
IQKQGQDQWT

SEQ ID NO: 2113 - protein, 10 aa, HUMAN IMMUNODEFICIENCY VIRUS
IQKQGQGQWT

SEQ ID NO: 2114 - protein, 10 aa, HUMAN IMMUNODEFICIENCY VIRUS
QIYQEPFKNL

SEQ ID NO: 2115 - protein, 10 aa, HUMAN IMMUNODEFICIENCY VIRUS
YQEPFKNLKT

SEQ ID NO: 2116 - protein, 10 aa, HUMAN IMMUNODEFICIENCY VIRUS
NLKTGKYAKM

SEQ ID NO: 2117 - protein, 10 aa, HUMAN IMMUNODEFICIENCY VIRUS
NLKTGKYARM

SEQ ID NO: 2118 - protein, 10 aa, HUMAN IMMUNODEFICIENCY VIRUS
KTGKYAKMRT

SEQ ID NO: 2119 - protein, 10 aa, HUMAN IMMUNODEFICIENCY VIRUS
RMRGAHTNDV

SEQ ID NO: 2120 - protein, 10 aa, HUMAN IMMUNODEFICIENCY VIRUS
GAHTNDVKQL

SEQ ID NO: 2121 - protein, 10 aa, HUMAN IMMUNODEFICIENCY VIRUS
SAHTNDVKQL

SEQ ID NO: 2122 - protein, 10 aa, HUMAN IMMUNODEFICIENCY VIRUS
TAHTNDVKQL

SEQ ID NO: 2123 - protein, 10 aa, HUMAN IMMUNODEFICIENCY VIRUS
KQLTEAVQKI

SEQ ID NO: 2124 - protein, 10 aa, HUMAN IMMUNODEFICIENCY VIRUS
QLTEAVQKIA

SEQ ID NO: 2125 - protein, 10 aa, HUMAN IMMUNODEFICIENCY VIRUS
LTEAVQKIAT

SEQ ID NO: 2126 - protein, 10 aa, HUMAN IMMUNODEFICIENCY VIRUS
AVQKIATESI

SEQ ID NO: 2127 - protein, 10 aa, HUMAN IMMUNODEFICIENCY VIRUS
VQKIATESIV

SEQ ID NO: 2128 - protein, 10 aa, HUMAN IMMUNODEFICIENCY VIRUS
ETWWTDYWQA

SEQ ID NO: 2129 - protein, 10 aa, HUMAN IMMUNODEFICIENCY VIRUS
WTDYWQATWI

SEQ ID NO: 2130 - protein, 10 aa, HUMAN IMMUNODEFICIENCY VIRUS
WTEYWQATWI

SEQ ID NO: 2131 - protein, 10 aa, HUMAN IMMUNODEFICIENCY VIRUS
ATWIPEWEFV

SEQ ID NO: 2132 - protein, 10 aa, HUMAN IMMUNODEFICIENCY VIRUS
WIPEWEFVNT

SEQ ID NO: 2133 - protein, 10 aa, HUMAN IMMUNODEFICIENCY VIRUS
FVNTPPLVKL

SEQ ID NO: 2134 - protein, 10 aa, HUMAN IMMUNODEFICIENCY VIRUS
LVKLWYQLET

SEQ ID NO: 2135 - protein, 10 aa, HUMAN IMMUNODEFICIENCY VIRUS
QLEKEPIVGA

SEQ ID NO: 2136 - protein, 10 aa, HUMAN IMMUNODEFICIENCY VIRUS
PIVGAETFYV

SEQ ID NO: 2137 - protein, 10 aa, HUMAN IMMUNODEFICIENCY VIRUS
GAETFYVDGA

SEQ ID NO: 2138 - protein, 10 aa, HUMAN IMMUNODEFICIENCY VIRUS
YVDGAANRET

SEQ ID NO: 2139 - protein, 10 aa, HUMAN IMMUNODEFICIENCY VIRUS
ETKLGKAGYV

SEQ ID NO: 2140 - protein, 10 aa, HUMAN IMMUNODEFICIENCY VIRUS
YVTDRGRQKV

SEQ ID NO: 2141 - protein, 10 aa, HUMAN IMMUNODEFICIENCY VIRUS
VTDRGRQKVV

SEQ ID NO: 2142 - protein, 10 aa, HUMAN IMMUNODEFICIENCY VIRUS
RQKVVSLTET

SEQ ID NO: 2143 - protein, 10 aa, HUMAN IMMUNODEFICIENCY VIRUS
SLTDTTNQKT

SEQ ID NO: 2144 - protein, 10 aa, HUMAN IMMUNODEFICIENCY VIRUS
SLTETTNQKT

SEQ ID NO: 2145 - protein, 10 aa, HUMAN IMMUNODEFICIENCY VIRUS
TTNQKTELHA

SEQ ID NO: 2146 - protein, 10 aa, HUMAN IMMUNODEFICIENCY VIRUS
TTNQKTELQA

SEQ ID NO: 2147 - protein, 10 aa, HUMAN IMMUNODEFICIENCY VIRUS
KTELQAIHLA

SEQ ID NO: 2148 - protein, 10 aa, HUMAN IMMUNODEFICIENCY VIRUS
KTELQAIYLA

SEQ ID NO: 2149 - protein, 10 aa, HUMAN IMMUNODEFICIENCY VIRUS
LALQDSGLEV

SEQ ID NO: 2150 - protein, 10 aa, HUMAN IMMUNODEFICIENCY VIRUS
LALQDSGSEV

SEQ ID NO: 2151 - protein, 10 aa, HUMAN IMMUNODEFICIENCY VIRUS
LQDSGLEVNI

SEQ ID NO: 2152 - protein, 10 aa, HUMAN IMMUNODEFICIENCY VIRUS
LQDSGSEVNI

SEQ ID NO: 2153 - protein, 10 aa, HUMAN IMMUNODEFICIENCY VIRUS
NIVTDSQYAL

SEQ ID NO: 2154 - protein, 10 aa, HUMAN IMMUNODEFICIENCY VIRUS
VTDSQYALGI

SEQ ID NO: 2155 - protein, 10 aa, HUMAN IMMUNODEFICIENCY VIRUS
SQYALGIIQA

SEQ ID NO: 2156 - protein, 10 aa, HUMAN IMMUNODEFICIENCY VIRUS
AQPDKSESEL

SEQ ID NO: 2157 - protein, 10 aa, HUMAN IMMUNODEFICIENCY VIRUS
ELVNQIIEQL

SEQ ID NO: 2158 - protein, 10 aa, HUMAN IMMUNODEFICIENCY VIRUS
ELVSQIIEQL

SEQ ID NO: 2159 - protein, 10 aa, HUMAN IMMUNODEFICIENCY VIRUS
LVNQIIEQLI

SEQ ID NO: 2160 - protein, 10 aa, HUMAN IMMUNODEFICIENCY VIRUS
LVSQIIEQLI

SEQ ID NO: 2161 - protein, 10 aa, HUMAN IMMUNODEFICIENCY VIRUS
QLIKKEKVYL

SEQ ID NO: 2162 - protein, 10 aa, HUMAN IMMUNODEFICIENCY VIRUS
LIKKEKVYLA

SEQ ID NO: 2163 - protein, 10 aa, HUMAN IMMUNODEFICIENCY VIRUS
LAWVPAHKGI

SEQ ID NO: 2164 - protein, 10 aa, HUMAN IMMUNODEFICIENCY VIRUS
QVDKLVSAGI

SEQ ID NO: 2165 - protein, 10 aa, HUMAN IMMUNODEFICIENCY VIRUS
QVDKLVSSGI

SEQ ID NO: 2166 - protein, 10 aa, HUMAN IMMUNODEFICIENCY VIRUS
KLVSAGIRKV

SEQ ID NO: 2167 - protein, 10 aa, HUMAN IMMUNODEFICIENCY VIRUS
KLVSSGIRKV

SEQ ID NO: 2168 - protein, 10 aa, HUMAN IMMUNODEFICIENCY VIRUS
LVSAGIRKVL

SEQ ID NO: 2169 - protein, 10 aa, HUMAN IMMUNODEFICIENCY VIRUS
LVSSGIRKVL

SEQ ID NO: 2170 - protein, 10 aa, HUMAN IMMUNODEFICIENCY VIRUS
SAGIRKVLFL

SEQ ID NO: 2171 - protein, 10 aa, HUMAN IMMUNODEFICIENCY VIRUS
VLFLDGIDKA

SEQ ID NO: 2172 - protein, 10 aa, HUMAN IMMUNODEFICIENCY VIRUS
MASDFNLPPI

SEQ ID NO: 2173 - protein, 10 aa, HUMAN IMMUNODEFICIENCY VIRUS
MASDFNLPPV

SEQ ID NO: 2174 - protein, 10 aa, HUMAN IMMUNODEFICIENCY VIRUS
NLPPIVAKEI

SEQ ID NO: 2175 - protein, 10 aa, HUMAN IMMUNODEFICIENCY VIRUS
NLPPVVAKEI

SEQ ID NO: 2176 - protein, 10 aa, HUMAN IMMUNODEFICIENCY VIRUS
IVASCDKCQL

SEQ ID NO: 2177 - protein, 10 aa, HUMAN IMMUNODEFICIENCY VIRUS
GIWQLDCTHL

SEQ ID NO: 2178 - protein, 10 aa, HUMAN IMMUNODEFICIENCY VIRUS
CTHLEGKIIL

SEQ ID NO: 2179 - protein, 10 aa, HUMAN IMMUNODEFICIENCY VIRUS
CTHLEGKVIL

SEQ ID NO: 2180 - protein, 10 aa, HUMAN IMMUNODEFICIENCY VIRUS
HLEGKIILVA

SEQ ID NO: 2181 - protein, 10 aa, HUMAN IMMUNODEFICIENCY VIRUS
HLEGKVILVA

SEQ ID NO: 2182 - protein, 10 aa, HUMAN IMMUNODEFICIENCY VIRUS
KIILVAVHVA

SEQ ID NO: 2183 - protein, 10 aa, HUMAN IMMUNODEFICIENCY VIRUS
KVILVAVHVA

SEQ ID NO: 2184 - protein, 10 aa, HUMAN IMMUNODEFICIENCY VIRUS
VAVHVASGYI

SEQ ID NO: 2185 - protein, 10 aa, HUMAN IMMUNODEFICIENCY VIRUS
VASGYIEAEV

SEQ ID NO: 2186 - protein, 10 aa, HUMAN IMMUNODEFICIENCY VIRUS
VIPAETGQET

SEQ ID NO: 2187 - protein, 10 aa, HUMAN IMMUNODEFICIENCY VIRUS
ETGQETAYFI

SEQ ID NO: 2188 - protein, 10 aa, HUMAN IMMUNODEFICIENCY VIRUS
ETGQETAYFL

SEQ ID NO: 2189 - protein, 10 aa, HUMAN IMMUNODEFICIENCY VIRUS
ETAYFILKLA

SEQ ID NO: 2190 - protein, 10 aa, HUMAN IMMUNODEFICIENCY VIRUS
ETAYFLLKLA

SEQ ID NO: 2191 - protein, 10 aa, HUMAN IMMUNODEFICIENCY VIRUS
ILKLAGRWPV

SEQ ID NO: 2192 - protein, 10 aa, HUMAN IMMUNODEFICIENCY VIRUS
LLKLAGRWPV

SEQ ID NO: 2193 - protein, 10 aa, HUMAN IMMUNODEFICIENCY VIRUS
KLAGRWPVKT

SEQ ID NO: 2194 - protein, 10 aa, HUMAN IMMUNODEFICIENCY VIRUS
KLAGRWPVKV

SEQ ID NO: 2195 - protein, 10 aa, HUMAN IMMUNODEFICIENCY VIRUS
LAGRWPVKTI

SEQ ID NO: 2196 - protein, 10 aa, HUMAN IMMUNODEFICIENCY VIRUS
LAGRWPVKVI

SEQ ID NO: 2197 - protein, 10 aa, HUMAN IMMUNODEFICIENCY VIRUS
AAVKAACWWA

SEQ ID NO: 2198 - protein, 10 aa, HUMAN IMMUNODEFICIENCY VIRUS
TTVKAACWWA

SEQ ID NO: 2199 - protein, 10 aa, HUMAN IMMUNODEFICIENCY VIRUS
WAGIKQEFGI

SEQ ID NO: 2200 - protein, 10 aa, HUMAN IMMUNODEFICIENCY VIRUS
WAGIQQEFGI

SEQ ID NO: 2201 - protein, 10 aa, HUMAN IMMUNODEFICIENCY VIRUS
PQSQGVVESM

SEQ ID NO: 2202 - protein, 10 aa, HUMAN IMMUNODEFICIENCY VIRUS
GVVESMNKEL

SEQ ID NO: 2203 - protein, 10 aa, HUMAN IMMUNODEFICIENCY VIRUS
SMNKELKKII

SEQ ID NO: 2204 - protein, 10 aa, HUMAN IMMUNODEFICIENCY VIRUS
KIIGQVRDQA

SEQ ID NO: 2205 - protein, 10 aa, HUMAN IMMUNODEFICIENCY VIRUS
KIIGQVREQA

SEQ ID NO: 2206 - protein, 10 aa, HUMAN IMMUNODEFICIENCY VIRUS
GQVRDQAEHL

SEQ ID NO: 2207 - protein, 10 aa, HUMAN IMMUNODEFICIENCY VIRUS
GQVREQAEHL

SEQ ID NO: 2208 - protein, 10 aa, HUMAN IMMUNODEFICIENCY VIRUS
DQAEHLKTAV

SEQ ID NO: 2209 - protein, 10 aa, HUMAN IMMUNODEFICIENCY VIRUS
EQAEHLKTAV

SEQ ID NO: 2210 - protein, 10 aa, HUMAN IMMUNODEFICIENCY VIRUS
HLKTAVQMAV

SEQ ID NO: 2211 - protein, 10 aa, HUMAN IMMUNODEFICIENCY VIRUS
KTAVQMAVFI

SEQ ID NO: 2212 - protein, 10 aa, HUMAN IMMUNODEFICIENCY VIRUS
SAGERIIDII

SEQ ID NO: 2213 - protein, 10 aa, HUMAN IMMUNODEFICIENCY VIRUS
SAGERIVDII

SEQ ID NO: 2214 - protein, 10 aa, HUMAN IMMUNODEFICIENCY VIRUS
RIIDIIASDI

SEQ ID NO: 2215 - protein, 10 aa, HUMAN IMMUNODEFICIENCY VIRUS
RIIDIIATDI

SEQ ID NO: 2216 - protein, 10 aa, HUMAN IMMUNODEFICIENCY VIRUS
RIVDIIATDI

SEQ ID NO: 2217 - protein, 10 aa, HUMAN IMMUNODEFICIENCY VIRUS
IASDIQTKEL

SEQ ID NO: 2218 - protein, 10 aa, HUMAN IMMUNODEFICIENCY VIRUS
IATDIQTKEL

SEQ ID NO: 2219 - protein, 10 aa, HUMAN IMMUNODEFICIENCY VIRUS
IQTKELQKQI

SEQ ID NO: 2220 - protein, 10 aa, HUMAN IMMUNODEFICIENCY VIRUS
QTKELQKQII

SEQ ID NO: 2221 - protein, 10 aa, HUMAN IMMUNODEFICIENCY VIRUS
QTKELQKQIT

SEQ ID NO: 2222 - protein, 10 aa, HUMAN IMMUNODEFICIENCY VIRUS
QIIKIQNFRV

SEQ ID NO: 2223 - protein, 10 aa, HUMAN IMMUNODEFICIENCY VIRUS
QITKIQNFRV

SEQ ID NO: 2224 - protein, 10 aa, HUMAN IMMUNODEFICIENCY VIRUS
PIWKGPAKLL

SEQ ID NO: 2225 - protein, 10 aa, HUMAN IMMUNODEFICIENCY VIRUS
PLWKGPAKLL

SEQ ID NO: 2226 - protein, 10 aa, HUMAN IMMUNODEFICIENCY VIRUS
KLLWKGEGAV

SEQ ID NO: 2227 - protein, 10 aa, HUMAN IMMUNODEFICIENCY VIRUS
LLWKGEGAVV

SEQ ID NO: 2228 - protein, 10 aa, HUMAN IMMUNODEFICIENCY VIRUS
AVVIQDNSDI

SEQ ID NO: 2229 - protein, 10 aa, HUMAN IMMUNODEFICIENCY VIRUS
AVVIQDNSEI

SEQ ID NO: 2230 - protein, 10 aa, HUMAN IMMUNODEFICIENCY VIRUS
VIQDNSDIKV

SEQ ID NO: 2231 - protein, 10 aa, HUMAN IMMUNODEFICIENCY VIRUS
VIQDNSEIKV

SEQ ID NO: 2232 - protein, 10 aa, HUMAN IMMUNODEFICIENCY VIRUS
IQDNSDIKVV

SEQ ID NO: 2233 - protein, 10 aa, HUMAN IMMUNODEFICIENCY VIRUS
IQDNSEIKVV

SEQ ID NO: 2234 - protein, 10 aa, HUMAN IMMUNODEFICIENCY VIRUS
DIKVVPRRKA

SEQ ID NO: 2235 - protein, 10 aa, HUMAN IMMUNODEFICIENCY VIRUS
EIKVVPRRKA

SEQ ID NO: 2236 - protein, 10 aa, HUMAN IMMUNODEFICIENCY VIRUS
KVVPRRKAKI

SEQ ID NO: 2237 - protein, 10 aa, HUMAN IMMUNODEFICIENCY VIRUS
KVVPRRKVKI

SEQ ID NO: 2238 - protein, 10 aa, HUMAN IMMUNODEFICIENCY VIRUS
VVPRRKAKII

SEQ ID NO: 2239 - protein, 10 aa, HUMAN IMMUNODEFICIENCY VIRUS
VVPRRKVKII

SEQ ID NO: 2240 - protein, 10 aa, HUMAN IMMUNODEFICIENCY VIRUS
KIIKDYGKQM

SEQ ID NO: 2241 - protein, 10 aa, HUMAN IMMUNODEFICIENCY VIRUS
KIIRDYGKQM

SEQ ID NO: 2242 - protein, 10 aa, HUMAN IMMUNODEFICIENCY VIRUS
IIKDYGKQMA

SEQ ID NO: 2243 - protein, 10 aa, HUMAN IMMUNODEFICIENCY VIRUS
IIRDYGKQMA

SEQ ID NO: 2244 - protein, 10 aa, HUMAN IMMUNODEFICIENCY VIRUS
KQMAGDDCVA

SEQ ID NO: 2245 - protein, 11 aa, HUMAN IMMUNODEFICIENCY VIRUS
GAISLSLPQIT

SEQ ID NO: 2246 - protein, 11 aa, HUMAN IMMUNODEFICIENCY VIRUS
AISLSLPQITL

SEQ ID NO: 2247 - protein, 11 aa, HUMAN IMMUNODEFICIENCY VIRUS
PQITLWQRPLV

SEQ ID NO: 2248 - protein, 11 aa, HUMAN IMMUNODEFICIENCY VIRUS
QITLWQRPLVT

SEQ ID NO: 2249 - protein, 11 aa, HUMAN IMMUNODEFICIENCY VIRUS
ITLWQRPLVTI

SEQ ID NO: 2250 - protein, 11 aa, HUMAN IMMUNODEFICIENCY VIRUS
ITLWQRPLVTV

SEQ ID NO: 2251 - protein, 11 aa, HUMAN IMMUNODEFICIENCY VIRUS
PLVTIKIGGQL

SEQ ID NO: 2252 - protein, 11 aa, HUMAN IMMUNODEFICIENCY VIRUS
TIKIGGQLKEA

SEQ ID NO: 2253 - protein, 11 aa, HUMAN IMMUNODEFICIENCY VIRUS
KIGGQLKEALL

SEQ ID NO: 2254 - protein, 11 aa, HUMAN IMMUNODEFICIENCY VIRUS
QLIEALLDTGA

SEQ ID NO: 2255 - protein, 11 aa, HUMAN IMMUNODEFICIENCY VIRUS
QLKEALLDTGA

SEQ ID NO: 2256 - protein, 11 aa, HUMAN IMMUNODEFICIENCY VIRUS
EALLDTGADDT

SEQ ID NO: 2257 - protein, 11 aa, HUMAN IMMUNODEFICIENCY VIRUS
ALLDTGADDTV

SEQ ID NO: 2258 - protein, 11 aa, HUMAN IMMUNODEFICIENCY VIRUS
LLDTGADDTVL

SEQ ID NO: 2259 - protein, 11 aa, HUMAN IMMUNODEFICIENCY VIRUS
NLPGKWKPKMI

SEQ ID NO: 2260 - protein, 11 aa, HUMAN IMMUNODEFICIENCY VIRUS
MIGGIGGFIKV

SEQ ID NO: 2261 - protein, 11 aa, HUMAN IMMUNODEFICIENCY VIRUS
FIKVRQYDQIL

SEQ ID NO: 2262 - protein, 11 aa, HUMAN IMMUNODEFICIENCY VIRUS
QILIEICGKKA

SEQ ID NO: 2263 - protein, 11 aa, HUMAN IMMUNODEFICIENCY VIRUS
ILIEICGKKAI

SEQ ID NO: 2264 - protein, 11 aa, HUMAN IMMUNODEFICIENCY VIRUS
EICGHKAIGTV

SEQ ID NO: 2265 - protein, 11 aa, HUMAN IMMUNODEFICIENCY VIRUS
EICGKKAIGTV

SEQ ID NO: 2266 - protein, 11 aa, HUMAN IMMUNODEFICIENCY VIRUS
KAIGTVLVGPT

SEQ ID NO: 2267 - protein, 11 aa, HUMAN IMMUNODEFICIENCY VIRUS
TVLVGPTPVNI

SEQ ID NO: 2268 - protein, 11 aa, HUMAN IMMUNODEFICIENCY VIRUS
VLVGPTPVNII

SEQ ID NO: 2269 - protein, 11 aa, HUMAN IMMUNODEFICIENCY VIRUS
PTPVNIIGRNL

SEQ ID NO: 2270 - protein, 11 aa, HUMAN IMMUNODEFICIENCY VIRUS
PTPVNIIGRNM

SEQ ID NO: 2271 - protein, 11 aa, HUMAN IMMUNODEFICIENCY VIRUS
PVNIIGRNLLT

SEQ ID NO: 2272 - protein, 11 aa, HUMAN IMMUNODEFICIENCY VIRUS
PVNIIGRNMLT

SEQ ID NO: 2273 - protein, 11 aa, HUMAN IMMUNODEFICIENCY VIRUS
NIIGRNLLTQI

SEQ ID NO: 2274 - protein, 11 aa, HUMAN IMMUNODEFICIENCY VIRUS
NIIGRNMLTQI

SEQ ID NO: 2275 - protein, 11 aa, HUMAN IMMUNODEFICIENCY VIRUS
NIIGRNMLTQL

SEQ ID NO: 2276 - protein, 11 aa, HUMAN IMMUNODEFICIENCY VIRUS
TQIGCTLNFPI

SEQ ID NO: 2277 - protein, 11 aa, HUMAN IMMUNODEFICIENCY VIRUS
TQLGCTLNFPI

SEQ ID NO: 2278 - protein, 11 aa, HUMAN IMMUNODEFICIENCY VIRUS
TLNFPISPIET

SEQ ID NO: 2279 - protein, 11 aa, HUMAN IMMUNODEFICIENCY VIRUS
ETVPVKLKPGM

SEQ ID NO: 2280 - protein, 11 aa, HUMAN IMMUNODEFICIENCY VIRUS
KLKPGMDGPKV

SEQ ID NO: 2281 - protein, 11 aa, HUMAN IMMUNODEFICIENCY VIRUS
PLTEEKIKALT

SEQ ID NO: 2282 - protein, 11 aa, HUMAN IMMUNODEFICIENCY VIRUS
PLTEEKIKALV

SEQ ID NO: 2283 - protein, 11 aa, HUMAN IMMUNODEFICIENCY VIRUS
EMEKEGKISKI

SEQ ID NO: 2284 - protein, 11 aa, HUMAN IMMUNODEFICIENCY VIRUS
PIFAIKKKDST

SEQ ID NO: 2285 - protein, 11 aa, HUMAN IMMUNODEFICIENCY VIRUS
PVFAIKKKDST

SEQ ID NO: 2286 - protein, 11 aa, HUMAN IMMUNODEFICIENCY VIRUS
LVDFRELNKRT

SEQ ID NO: 2287 - protein, 11 aa, HUMAN IMMUNODEFICIENCY VIRUS
TQDFWEVQLGI

SEQ ID NO: 2288 - protein, 11 aa, HUMAN IMMUNODEFICIENCY VIRUS
VQLGIPHPAGL

SEQ ID NO: 2289 - protein, 11 aa, HUMAN IMMUNODEFICIENCY VIRUS
PAGLKKKKSVT

SEQ ID NO: 2290 - protein, 11 aa, HUMAN IMMUNODEFICIENCY VIRUS
GLKKKKSVTVL

SEQ ID NO: 2291 - protein, 11 aa, HUMAN IMMUNODEFICIENCY VIRUS
VLDVGDAYFSV

SEQ ID NO: 2292 - protein, 11 aa, HUMAN IMMUNODEFICIENCY VIRUS
DVGDAYFSVPL

SEQ ID NO: 2293 - protein, 11 aa, HUMAN IMMUNODEFICIENCY VIRUS
PLDKDFRKYTA

SEQ ID NO: 2294 - protein, 11 aa, HUMAN IMMUNODEFICIENCY VIRUS
ETPGIRYQYNV

SEQ ID NO: 2295 - protein, 11 aa, HUMAN IMMUNODEFICIENCY VIRUS
VLPQGWKGSPA

SEQ ID NO: 2296 - protein, 11 aa, HUMAN IMMUNODEFICIENCY VIRUS
PAIFQSSMTKI

SEQ ID NO: 2297 - protein, 11 aa, HUMAN IMMUNODEFICIENCY VIRUS
AIFQSSMTKIL

SEQ ID NO: 2298 - protein, 11 aa, HUMAN IMMUNODEFICIENCY VIRUS
DIVIYQYMDDL

SEQ ID NO: 2299 - protein, 11 aa, HUMAN IMMUNODEFICIENCY VIRUS
EIVIYQYMDDL

SEQ ID NO: 2300 - protein, 11 aa, HUMAN IMMUNODEFICIENCY VIRUS
VIYQYMDDLYV

SEQ ID NO: 2301 - protein, 11 aa, HUMAN IMMUNODEFICIENCY VIRUS
YMDDLYVGSDL

SEQ ID NO: 2302 - protein, 11 aa, HUMAN IMMUNODEFICIENCY VIRUS
DLEIGQHRAKI

SEQ ID NO: 2303 - protein, 11 aa, HUMAN IMMUNODEFICIENCY VIRUS
DLEIGQHRTKI

SEQ ID NO: 2304 - protein, 11 aa, HUMAN IMMUNODEFICIENCY VIRUS
RAKIEELREHL

SEQ ID NO: 2305 - protein, 11 aa, HUMAN IMMUNODEFICIENCY VIRUS
RTKIEELRQHL

SEQ ID NO: 2306 - protein, 11 aa, HUMAN IMMUNODEFICIENCY VIRUS
RQHLLRWGFTT

SEQ ID NO: 2307 - protein, 11 aa, HUMAN IMMUNODEFICIENCY VIRUS
PIQLPEKDSWT

SEQ ID NO: 2308 - protein, 11 aa, HUMAN IMMUNODEFICIENCY VIRUS
PIVLPEKDSWT

SEQ ID NO: 2309 - protein, 11 aa, HUMAN IMMUNODEFICIENCY VIRUS
IQLPEKDSWTV

SEQ ID NO: 2310 - protein, 11 aa, HUMAN IMMUNODEFICIENCY VIRUS
IVLPEKDSWTV

SEQ ID NO: 2311 - protein, 11 aa, HUMAN IMMUNODEFICIENCY VIRUS
IQKLVGKLNWA

SEQ ID NO: 2312 - protein, 11 aa, HUMAN IMMUNODEFICIENCY VIRUS
LVGKLNWASQI

SEQ ID NO: 2313 - protein, 11 aa, HUMAN IMMUNODEFICIENCY VIRUS
WASQIYAGIKV

SEQ ID NO: 2314 - protein, 11 aa, HUMAN IMMUNODEFICIENCY VIRUS
WASQIYPGIKV

SEQ ID NO: 2315 - protein, 11 aa, HUMAN IMMUNODEFICIENCY VIRUS
QIYAGIKVKQL

SEQ ID NO: 2316 - protein, 11 aa, HUMAN IMMUNODEFICIENCY VIRUS
QIYPGIKVKQL

SEQ ID NO: 2317 - protein, 11 aa, HUMAN IMMUNODEFICIENCY VIRUS
QIYPGIKVRQL

SEQ ID NO: 2318 - protein, 11 aa, HUMAN IMMUNODEFICIENCY VIRUS
GIKVKQLCKLL

SEQ ID NO: 2319 - protein, 11 aa, HUMAN IMMUNODEFICIENCY VIRUS
GIKVRQLCKLL

SEQ ID NO: 2320 - protein, 11 aa, HUMAN IMMUNODEFICIENCY VIRUS
QLCKLLRGAKA

SEQ ID NO: 2321 - protein, 11 aa, HUMAN IMMUNODEFICIENCY VIRUS
QLCKLLRGTKA

SEQ ID NO: 2322 - protein, 11 aa, HUMAN IMMUNODEFICIENCY VIRUS
LLRGAKALTDI

SEQ ID NO: 2323 - protein, 11 aa, HUMAN IMMUNODEFICIENCY VIRUS
LLRGTKALTEV

SEQ ID NO: 2324 - protein, 11 aa, HUMAN IMMUNODEFICIENCY VIRUS
GAKALTDIVPL

SEQ ID NO: 2325 - protein, 11 aa, HUMAN IMMUNODEFICIENCY VIRUS
GTKALTEVIPL

SEQ ID NO: 2326 - protein, 11 aa, HUMAN IMMUNODEFICIENCY VIRUS
LTDIVPLTEEA

SEQ ID NO: 2327 - protein, 11 aa, HUMAN IMMUNODEFICIENCY VIRUS
LTEVIPLTEEA

SEQ ID NO: 2328 - protein, 11 aa, HUMAN IMMUNODEFICIENCY VIRUS
DIVPLTEEAEL

SEQ ID NO: 2329 - protein, 11 aa, HUMAN IMMUNODEFICIENCY VIRUS
EVIPLTEEAEL

SEQ ID NO: 2330 - protein, 11 aa, HUMAN IMMUNODEFICIENCY VIRUS
PLTEEAELELA

SEQ ID NO: 2331 - protein, 11 aa, HUMAN IMMUNODEFICIENCY VIRUS
ELELAENREIL

SEQ ID NO: 2332 - protein, 11 aa, HUMAN IMMUNODEFICIENCY VIRUS
GVYYDPSKDLI

SEQ ID NO: 2333 - protein, 11 aa, HUMAN IMMUNODEFICIENCY VIRUS
EIQKQGQDQWT

SEQ ID NO: 2334 - protein, 11 aa, HUMAN IMMUNODEFICIENCY VIRUS
EIQKQGQGQWT

SEQ ID NO: 2335 - protein, 11 aa, HUMAN IMMUNODEFICIENCY VIRUS
KQGQDQWTYQI

SEQ ID NO: 2336 - protein, 11 aa, HUMAN IMMUNODEFICIENCY VIRUS
KQGQGQWTYQI

SEQ ID NO: 2337 - protein, 11 aa, HUMAN IMMUNODEFICIENCY VIRUS
YQIYQEPFKNL

SEQ ID NO: 2338 - protein, 11 aa, HUMAN IMMUNODEFICIENCY VIRUS
KTGKYAKMRTA

SEQ ID NO: 2339 - protein, 11 aa, HUMAN IMMUNODEFICIENCY VIRUS
KTGKYARMRGA

SEQ ID NO: 2340 - protein, 11 aa, HUMAN IMMUNODEFICIENCY VIRUS
GAHTNDVKQLT

SEQ ID NO: 2341 - protein, 11 aa, HUMAN IMMUNODEFICIENCY VIRUS
SAHTNDVKQLT

SEQ ID NO: 2342 - protein, 11 aa, HUMAN IMMUNODEFICIENCY VIRUS
TAHTNDVKQLT

SEQ ID NO: 2343 - protein, 11 aa, HUMAN IMMUNODEFICIENCY VIRUS
HTNDVKQLTEA

SEQ ID NO: 2344 - protein, 11 aa, HUMAN IMMUNODEFICIENCY VIRUS
KQLTEAVQKIA

SEQ ID NO: 2345 - protein, 11 aa, HUMAN IMMUNODEFICIENCY VIRUS
QLTEAVQKIAT

SEQ ID NO: 2346 - protein, 11 aa, HUMAN IMMUNODEFICIENCY VIRUS
EAVQKIATESI

SEQ ID NO: 2347 - protein, 11 aa, HUMAN IMMUNODEFICIENCY VIRUS
AVQKIATESIV

SEQ ID NO: 2348 - protein, 11 aa, HUMAN IMMUNODEFICIENCY VIRUS
VQKIATESIVI

SEQ ID NO: 2349 - protein, 11 aa, HUMAN IMMUNODEFICIENCY VIRUS
ATESIVIWGKT

SEQ ID NO: 2350 - protein, 11 aa, HUMAN IMMUNODEFICIENCY VIRUS
VIWGKTPKFKL

SEQ ID NO: 2351 - protein, 11 aa, HUMAN IMMUNODEFICIENCY VIRUS
VIWGKTPKFRL

SEQ ID NO: 2352 - protein, 11 aa, HUMAN IMMUNODEFICIENCY VIRUS
RLPIQKETWET

SEQ ID NO: 2353 - protein, 11 aa, HUMAN IMMUNODEFICIENCY VIRUS
IQKETWEAWWT

SEQ ID NO: 2354 - protein, 11 aa, HUMAN IMMUNODEFICIENCY VIRUS
IQKETWETWWT

SEQ ID NO: 2355 - protein, 11 aa, HUMAN IMMUNODEFICIENCY VIRUS
ETWWTDYWQAT

SEQ ID NO: 2356 - protein, 11 aa, HUMAN IMMUNODEFICIENCY VIRUS
QATWIPEWEFV

SEQ ID NO: 2357 - protein, 11 aa, HUMAN IMMUNODEFICIENCY VIRUS
KLWYQLEKDPI

SEQ ID NO: 2358 - protein, 11 aa, HUMAN IMMUNODEFICIENCY VIRUS
KLWYQLEKEPI

SEQ ID NO: 2359 - protein, 11 aa, HUMAN IMMUNODEFICIENCY VIRUS
KLWYQLETEPI

SEQ ID NO: 2360 - protein, 11 aa, HUMAN IMMUNODEFICIENCY VIRUS
YQLEKEPIVGA

SEQ ID NO: 2361 - protein, 11 aa, HUMAN IMMUNODEFICIENCY VIRUS
GAETFYVDGAA

SEQ ID NO: 2362 - protein, 11 aa, HUMAN IMMUNODEFICIENCY VIRUS
AANRETKLGKA

SEQ ID NO: 2363 - protein, 11 aa, HUMAN IMMUNODEFICIENCY VIRUS
ETKLGKAGYVT

SEQ ID NO: 2364 - protein, 11 aa, HUMAN IMMUNODEFICIENCY VIRUS
YVTDRGRQKVV

SEQ ID NO: 2365 - protein, 11 aa, HUMAN IMMUNODEFICIENCY VIRUS
RQKVVSLTETT

SEQ ID NO: 2366 - protein, 11 aa, HUMAN IMMUNODEFICIENCY VIRUS
LTDTTNQKTEL

SEQ ID NO: 2367 - protein, 11 aa, HUMAN IMMUNODEFICIENCY VIRUS
LTETTNQKTEL

SEQ ID NO: 2368 - protein, 11 aa, HUMAN IMMUNODEFICIENCY VIRUS
DTTNQKTELQA

SEQ ID NO: 2369 - protein, 11 aa, HUMAN IMMUNODEFICIENCY VIRUS
ETTNQKTELHA

SEQ ID NO: 2370 - protein, 11 aa, HUMAN IMMUNODEFICIENCY VIRUS
ETTNQKTELQA

SEQ ID NO: 2371 - protein, 11 aa, HUMAN IMMUNODEFICIENCY VIRUS
TTNQKTELHAI

SEQ ID NO: 2372 - protein, 11 aa, HUMAN IMMUNODEFICIENCY VIRUS
TTNQKTELQAI

SEQ ID NO: 2373 - protein, 11 aa, HUMAN IMMUNODEFICIENCY VIRUS
NQKTELQAIHL

SEQ ID NO: 2374 - protein, 11 aa, HUMAN IMMUNODEFICIENCY VIRUS
NQKTELQAIYL

SEQ ID NO: 2375 - protein, 11 aa, HUMAN IMMUNODEFICIENCY VIRUS
KTELQAIHLAL

SEQ ID NO: 2376 - protein, 11 aa, HUMAN IMMUNODEFICIENCY VIRUS
KTELQAIYLAL

SEQ ID NO: 2377 - protein, 11 aa, HUMAN IMMUNODEFICIENCY VIRUS
AIHLALQDSGL

SEQ ID NO: 2378 - protein, 11 aa, HUMAN IMMUNODEFICIENCY VIRUS
HLALQDSGLEV

SEQ ID NO: 2379 - protein, 11 aa, HUMAN IMMUNODEFICIENCY VIRUS
ALQDSGLEVNI

SEQ ID NO: 2380 - protein, 11 aa, HUMAN IMMUNODEFICIENCY VIRUS
ALQDSGSEVNI

SEQ ID NO: 2381 - protein, 11 aa, HUMAN IMMUNODEFICIENCY VIRUS
LQDSGLEVNIV

SEQ ID NO: 2382 - protein, 11 aa, HUMAN IMMUNODEFICIENCY VIRUS
LQDSGSEVNIV

SEQ ID NO: 2383 - protein, 11 aa, HUMAN IMMUNODEFICIENCY VIRUS
EVNIVTDSQYA

SEQ ID NO: 2384 - protein, 11 aa, HUMAN IMMUNODEFICIENCY VIRUS
IVTDSQYALGI

SEQ ID NO: 2385 - protein, 11 aa, HUMAN IMMUNODEFICIENCY VIRUS
VTDSQYALGII

SEQ ID NO: 2386 - protein, 11 aa, HUMAN IMMUNODEFICIENCY VIRUS
QAQPDKSESEL

SEQ ID NO: 2387 - protein, 11 aa, HUMAN IMMUNODEFICIENCY VIRUS
AQPDKSESELV

SEQ ID NO: 2388 - protein, 11 aa, HUMAN IMMUNODEFICIENCY VIRUS
ELVNQIIEQLI

SEQ ID NO: 2389 - protein, 11 aa, HUMAN IMMUNODEFICIENCY VIRUS
ELVSQIIEQLI

SEQ ID NO: 2390 - protein, 11 aa, HUMAN IMMUNODEFICIENCY VIRUS
IIEQLIKKEKV

SEQ ID NO: 2391 - protein, 11 aa, HUMAN IMMUNODEFICIENCY VIRUS
EQLIKKEKVYL

SEQ ID NO: 2392 - protein, 11 aa, HUMAN IMMUNODEFICIENCY VIRUS
QLIKKEKVYLA

SEQ ID NO: 2393 - protein, 11 aa, HUMAN IMMUNODEFICIENCY VIRUS
YLAWVPAHKGI

SEQ ID NO: 2394 - protein, 11 aa, HUMAN IMMUNODEFICIENCY VIRUS
YLSWVPAHKGI

SEQ ID NO: 2395 - protein, 11 aa, HUMAN IMMUNODEFICIENCY VIRUS
GIGGNEQVDKL

SEQ ID NO: 2396 - protein, 11 aa, HUMAN IMMUNODEFICIENCY VIRUS
EQVDKLVSAGI

SEQ ID NO: 2397 - protein, 11 aa, HUMAN IMMUNODEFICIENCY VIRUS
EQVDKLVSSGI

SEQ ID NO: 2398 - protein, 11 aa, HUMAN IMMUNODEFICIENCY VIRUS
KLVSAGIRKVL

SEQ ID NO: 2399 - protein, 11 aa, HUMAN IMMUNODEFICIENCY VIRUS
KLVSSGIRKVL

SEQ ID NO: 2400 - protein, 11 aa, HUMAN IMMUNODEFICIENCY VIRUS
GIRKVLFLDGI

SEQ ID NO: 2401 - protein, 11 aa, HUMAN IMMUNODEFICIENCY VIRUS
KVLFLDGIDKA

SEQ ID NO: 2402 - protein, 11 aa, HUMAN IMMUNODEFICIENCY VIRUS
AMASDFNLPPI

SEQ ID NO: 2403 - protein, 11 aa, HUMAN IMMUNODEFICIENCY VIRUS
AMASDFNLPPV

SEQ ID NO: 2404 - protein, 11 aa, HUMAN IMMUNODEFICIENCY VIRUS
MASDFNLPPIV

SEQ ID NO: 2405 - protein, 11 aa, HUMAN IMMUNODEFICIENCY VIRUS
MASDFNLPPVV

SEQ ID NO: 2406 - protein, 11 aa, HUMAN IMMUNODEFICIENCY VIRUS
NLPPIVAKEIV

SEQ ID NO: 2407 - protein, 11 aa, HUMAN IMMUNODEFICIENCY VIRUS
NLPPVVAKEIV

SEQ ID NO: 2408 - protein, 11 aa, HUMAN IMMUNODEFICIENCY VIRUS
EIVASCDKCQL

SEQ ID NO: 2409 - protein, 11 aa, HUMAN IMMUNODEFICIENCY VIRUS
QLKGEAMHGQV

SEQ ID NO: 2410 - protein, 11 aa, HUMAN IMMUNODEFICIENCY VIRUS
QVDCSPGIWQL

SEQ ID NO: 2411 - protein, 11 aa, HUMAN IMMUNODEFICIENCY VIRUS
QLDCTHLEGKI

SEQ ID NO: 2412 - protein, 11 aa, HUMAN IMMUNODEFICIENCY VIRUS
QLDCTHLEGKV

SEQ ID NO: 2413 - protein, 11 aa, HUMAN IMMUNODEFICIENCY VIRUS
CTHLEGKIILV

SEQ ID NO: 2414 - protein, 11 aa, HUMAN IMMUNODEFICIENCY VIRUS
CTHLEGKVILV

SEQ ID NO: 2415 - protein, 11 aa, HUMAN IMMUNODEFICIENCY VIRUS
HLEGKIILVAV

SEQ ID NO: 2416 - protein, 11 aa, HUMAN IMMUNODEFICIENCY VIRUS
HLEGKVILVAV

SEQ ID NO: 2417 - protein, 11 aa, HUMAN IMMUNODEFICIENCY VIRUS
LVAVHVASGYI

SEQ ID NO: 2418 - protein, 11 aa, HUMAN IMMUNODEFICIENCY VIRUS
AVHVASGYIEA

SEQ ID NO: 2419 - protein, 11 aa, HUMAN IMMUNODEFICIENCY VIRUS
HVASGYIEAEV

SEQ ID NO: 2420 - protein, 11 aa, HUMAN IMMUNODEFICIENCY VIRUS
VASGYIEAEVI

SEQ ID NO: 2421 - protein, 11 aa, HUMAN IMMUNODEFICIENCY VIRUS
YIEAEVIPAET

SEQ ID NO: 2422 - protein, 11 aa, HUMAN IMMUNODEFICIENCY VIRUS
EVIPAETGQET

SEQ ID NO: 2423 - protein, 11 aa, HUMAN IMMUNODEFICIENCY VIRUS
VIPAETGQETA

SEQ ID NO: 2424 - protein, 11 aa, HUMAN IMMUNODEFICIENCY VIRUS
ETGQETAYFIL

SEQ ID NO: 2425 - protein, 11 aa, HUMAN IMMUNODEFICIENCY VIRUS
ETGQETAYFLL

SEQ ID NO: 2426 - protein, 11 aa, HUMAN IMMUNODEFICIENCY VIRUS
GQETAYFILKL

SEQ ID NO: 2427 - protein, 11 aa, HUMAN IMMUNODEFICIENCY VIRUS
GQETAYFLLKL

SEQ ID NO: 2428 - protein, 11 aa, HUMAN IMMUNODEFICIENCY VIRUS
FILKLAGRWPV

SEQ ID NO: 2429 - protein, 11 aa, HUMAN IMMUNODEFICIENCY VIRUS
FLLKLAGRWPV

SEQ ID NO: 2430 - protein, 11 aa, HUMAN IMMUNODEFICIENCY VIRUS
KLAGRWPVKTI

SEQ ID NO: 2431 - protein, 11 aa, HUMAN IMMUNODEFICIENCY VIRUS
KLAGRWPVKVI

SEQ ID NO: 2432 - protein, 11 aa, HUMAN IMMUNODEFICIENCY VIRUS
TIHTDNGSNFT

SEQ ID NO: 2433 - protein, 11 aa, HUMAN IMMUNODEFICIENCY VIRUS
VIHTDNGSNFT

SEQ ID NO: 2434 - protein, 11 aa, HUMAN IMMUNODEFICIENCY VIRUS
HTDNGSNFTSA

SEQ ID NO: 2435 - protein, 11 aa, HUMAN IMMUNODEFICIENCY VIRUS
HTDNGSNFTST

SEQ ID NO: 2436 - protein, 11 aa, HUMAN IMMUNODEFICIENCY VIRUS
SAAVKAACWWA

SEQ ID NO: 2437 - protein, 11 aa, HUMAN IMMUNODEFICIENCY VIRUS
STTVKAACWWA

SEQ ID NO: 2438 - protein, 11 aa, HUMAN IMMUNODEFICIENCY VIRUS
AVKAACWWAGI

SEQ ID NO: 2439 - protein, 11 aa, HUMAN IMMUNODEFICIENCY VIRUS
TVKAACWWAGI

SEQ ID NO: 2440 - protein, 11 aa, HUMAN IMMUNODEFICIENCY VIRUS
GIPYNPQSQGV

SEQ ID NO: 2441 - protein, 11 aa, HUMAN IMMUNODEFICIENCY VIRUS
QVRDQAEHLKT

SEQ ID NO: 2442 - protein, 11 aa, HUMAN IMMUNODEFICIENCY VIRUS
QVREQAEHLKT

SEQ ID NO: 2443 - protein, 11 aa, HUMAN IMMUNODEFICIENCY VIRUS
QAEHLKTAVQM

SEQ ID NO: 2444 - protein, 11 aa, HUMAN IMMUNODEFICIENCY VIRUS
FIHNFKRKGGI

SEQ ID NO: 2445 - protein, 11 aa, HUMAN IMMUNODEFICIENCY VIRUS
GIGGYSAGERI

SEQ ID NO: 2446 - protein, 11 aa, HUMAN IMMUNODEFICIENCY VIRUS
SAGERIIDIIA

SEQ ID NO: 2447 - protein, 11 aa, HUMAN IMMUNODEFICIENCY VIRUS
SAGERIVDIIA

SEQ ID NO: 2448 - protein, 11 aa, HUMAN IMMUNODEFICIENCY VIRUS
IIDIIASDIQT

SEQ ID NO: 2449 - protein, 11 aa, HUMAN IMMUNODEFICIENCY VIRUS
IIDIIATDIQT

SEQ ID NO: 2450 - protein, 11 aa, HUMAN IMMUNODEFICIENCY VIRUS
IVDIIATDIQT

SEQ ID NO: 2451 - protein, 11 aa, HUMAN IMMUNODEFICIENCY VIRUS
IIASDIQTKEL

SEQ ID NO: 2452 - protein, 11 aa, HUMAN IMMUNODEFICIENCY VIRUS
IIATDIQTKEL

SEQ ID NO: 2453 - protein, 11 aa, HUMAN IMMUNODEFICIENCY VIRUS
DIQTKELQKQI

SEQ ID NO: 2454 - protein, 11 aa, HUMAN IMMUNODEFICIENCY VIRUS
IQTKELQKQII

SEQ ID NO: 2455 - protein, 11 aa, HUMAN IMMUNODEFICIENCY VIRUS
IQTKELQKQIT

SEQ ID NO: 2456 - protein, 11 aa, HUMAN IMMUNODEFICIENCY VIRUS
KQIIKIQNFRV

SEQ ID NO: 2457 - protein, 11 aa, HUMAN IMMUNODEFICIENCY VIRUS
KQITKIQNFRV

SEQ ID NO: 2458 - protein, 11 aa, HUMAN IMMUNODEFICIENCY VIRUS
RVYYRDSRDPI

SEQ ID NO: 2459 - protein, 11 aa, HUMAN IMMUNODEFICIENCY VIRUS
RVYYRDSRDPL

SEQ ID NO: 2460 - protein, 11 aa, HUMAN IMMUNODEFICIENCY VIRUS
PAKLLWKGEGA

SEQ ID NO: 2461 - protein, 11 aa, HUMAN IMMUNODEFICIENCY VIRUS
KLLWKGEGAVV

SEQ ID NO: 2462 - protein, 11 aa, HUMAN IMMUNODEFICIENCY VIRUS
LLWKGEGAVVI

SEQ ID NO: 2463 - protein, 11 aa, HUMAN IMMUNODEFICIENCY VIRUS
GAVVIQDNSDI

SEQ ID NO: 2464 - protein, 11 aa, HUMAN IMMUNODEFICIENCY VIRUS
GAVVIQDNSEI

SEQ ID NO: 2465 - protein, 11 aa, HUMAN IMMUNODEFICIENCY VIRUS
VVIQDNSDIKV

SEQ ID NO: 2466 - protein, 11 aa, HUMAN IMMUNODEFICIENCY VIRUS
VVIQDNSEIKV

SEQ ID NO: 2467 - protein, 11 aa, HUMAN IMMUNODEFICIENCY VIRUS
VIQDNSDIKVV

SEQ ID NO: 2468 - protein, 11 aa, HUMAN IMMUNODEFICIENCY VIRUS
VIQDNSEIKVV

SEQ ID NO: 2469 - protein, 11 aa, HUMAN IMMUNODEFICIENCY VIRUS
KVVPRRKAKII

SEQ ID NO: 2470 - protein, 11 aa, HUMAN IMMUNODEFICIENCY VIRUS
KVVPRRKVKII

SEQ ID NO: 2471 - protein, 11 aa, HUMAN IMMUNODEFICIENCY VIRUS
KIIKDYGKQMA

SEQ ID NO: 2472 - protein, 11 aa, HUMAN IMMUNODEFICIENCY VIRUS
KIIRDYGKQMA

SEQ ID NO: 2473 - protein, 8 aa, HUMAN IMMUNODEFICIENCY VIRUS
LLKTVRLI

SEQ ID NO: 2474 - protein, 8 aa, HUMAN IMMUNODEFICIENCY VIRUS
AVRIIKIL

SEQ ID NO: 2475 - protein, 8 aa, HUMAN IMMUNODEFICIENCY VIRUS
RQRQIHSI

SEQ ID NO: 2476 - protein, 8 aa, HUMAN IMMUNODEFICIENCY VIRUS
QLPPIERL

SEQ ID NO: 2477 - protein, 8 aa, HUMAN IMMUNODEFICIENCY VIRUS
QLPPLERL

SEQ ID NO: 2478 - protein, 8 aa, HUMAN IMMUNODEFICIENCY VIRUS
GTSGTQGV

SEQ ID NO: 2479 - protein, 8 aa, HUMAN IMMUNODEFICIENCY VIRUS
GTQQSQGT

SEQ ID NO: 2480 - protein, 8 aa, HUMAN IMMUNODEFICIENCY VIRUS
PQGTETGV

SEQ ID NO: 2481 - protein, 8 aa, HUMAN IMMUNODEFICIENCY VIRUS
SQGTETGV

SEQ ID NO: 2482 - protein, 8 aa, HUMAN IMMUNODEFICIENCY VIRUS
LVESPAVL

SEQ ID NO: 2483 - protein, 9 aa, HUMAN IMMUNODEFICIENCY VIRUS
SISERILST

SEQ ID NO: 2484 - protein, 9 aa, HUMAN IMMUNODEFICIENCY VIRUS
CLGRPAEPV

SEQ ID NO: 2485 - protein, 9 aa, HUMAN IMMUNODEFICIENCY VIRUS
PAEPVPLQL

SEQ ID NO: 2486 - protein, 9 aa, HUMAN IMMUNODEFICIENCY VIRUS
SAEPVPLQL

SEQ ID NO: 2487 - protein, 9 aa, HUMAN IMMUNODEFICIENCY VIRUS
PVPLQLPPI

SEQ ID NO: 2488 - protein, 9 aa, HUMAN IMMUNODEFICIENCY VIRUS
PVPLQLPPL

SEQ ID NO: 2489 - protein, 9 aa, HUMAN IMMUNODEFICIENCY VIRUS
LQLPPIERL

SEQ ID NO: 2490 - protein, 9 aa, HUMAN IMMUNODEFICIENCY VIRUS
LQLPPLERL

SEQ ID NO: 2491 - protein, 9 aa, HUMAN IMMUNODEFICIENCY VIRUS
QLPPLERLT

SEQ ID NO: 2492 - protein, 9 aa, HUMAN IMMUNODEFICIENCY VIRUS
TQGVGSPQI

SEQ ID NO: 2493 - protein, 10 aa, HUMAN IMMUNODEFICIENCY VIRUS
RARQRQIHSI

SEQ ID NO: 2494 - protein, 10 aa, HUMAN IMMUNODEFICIENCY VIRUS
PLQLPPIERL

SEQ ID NO: 2495 - protein, 10 aa, HUMAN IMMUNODEFICIENCY VIRUS
PLQLPPLERL

SEQ ID NO: 2496 - protein, 10 aa, HUMAN IMMUNODEFICIENCY VIRUS
LQLPPLERLT

SEQ ID NO: 2497 - protein, 10 aa, HUMAN IMMUNODEFICIENCY VIRUS
QLPPLERLTL

SEQ ID NO: 2498 - protein, 10 aa, HUMAN IMMUNODEFICIENCY VIRUS
GTQGVGSPQI

SEQ ID NO: 2499 - protein, 11 aa, HUMAN IMMUNODEFICIENCY VIRUS
PLQLPPLERLT

SEQ ID NO: 2500 - protein, 11 aa, HUMAN IMMUNODEFICIENCY VIRUS
LQLPPLERLTL

SEQ ID NO: 2501 - protein, 11 aa, HUMAN IMMUNODEFICIENCY VIRUS
GTSGTQQSQGT

SEQ ID NO: 2502 - protein, 8 aa, HUMAN IMMUNODEFICIENCY VIRUS
SQPKTACT

SEQ ID NO: 2503 - protein, 8 aa, HUMAN IMMUNODEFICIENCY VIRUS
FLNKGLGI

SEQ ID NO: 2504 - protein, 8 aa, HUMAN IMMUNODEFICIENCY VIRUS
SQPRGDPT

SEQ ID NO: 2505 - protein, 8 aa, HUMAN IMMUNODEFICIENCY VIRUS
KVERETET

SEQ ID NO: 2506 - protein, 11 aa, HUMAN IMMUNODEFICIENCY VIRUS
PTGPKESKKKV

SEQ ID NO: 2507 - protein, 8 aa, HUMAN IMMUNODEFICIENCY VIRUS
QVMIVWQV

SEQ ID NO: 2508 - protein, 8 aa, HUMAN IMMUNODEFICIENCY VIRUS
IVWQVDRM

SEQ ID NO: 2509 - protein, 8 aa, HUMAN IMMUNODEFICIENCY VIRUS
WQVDRMKI

SEQ ID NO: 2510 - protein, 8 aa, HUMAN IMMUNODEFICIENCY VIRUS
WQVDRMRI

SEQ ID NO: 2511 - protein, 8 aa, HUMAN IMMUNODEFICIENCY VIRUS
KIRTWNSL

SEQ ID NO: 2512 - protein, 8 aa, HUMAN IMMUNODEFICIENCY VIRUS
RIRTWKSL

SEQ ID NO: 2513 - protein, 8 aa, HUMAN IMMUNODEFICIENCY VIRUS
RIRTWNSL

SEQ ID NO: 2514 - protein, 8 aa, HUMAN IMMUNODEFICIENCY VIRUS
LVKHHMYI

SEQ ID NO: 2515 - protein, 8 aa, HUMAN IMMUNODEFICIENCY VIRUS
LVKHHMYV

SEQ ID NO: 2516 - protein, 8 aa, HUMAN IMMUNODEFICIENCY VIRUS
HMYVSKKA

SEQ ID NO: 2517 - protein, 8 aa, HUMAN IMMUNODEFICIENCY VIRUS
KISSEVHI

SEQ ID NO: 2518 - protein, 8 aa, HUMAN IMMUNODEFICIENCY VIRUS
KVSSEVHI

SEQ ID NO: 2519 - protein, 8 aa, HUMAN IMMUNODEFICIENCY VIRUS
RISSEVHI

SEQ ID NO: 2520 - protein, 8 aa, HUMAN IMMUNODEFICIENCY VIRUS
PLGDARLV

SEQ ID NO: 2521 - protein, 8 aa, HUMAN IMMUNODEFICIENCY VIRUS
PLGEARLV

SEQ ID NO: 2522 - protein, 8 aa, HUMAN IMMUNODEFICIENCY VIRUS
VIKTYWGL

SEQ ID NO: 2523 - protein, 8 aa, HUMAN IMMUNODEFICIENCY VIRUS
VITTYWGL

SEQ ID NO: 2524 - protein, 8 aa, HUMAN IMMUNODEFICIENCY VIRUS
VVRTYWGL

SEQ ID NO: 2525 - protein, 8 aa, HUMAN IMMUNODEFICIENCY VIRUS
VVTTYWGL

SEQ ID NO: 2526 - protein, 8 aa, HUMAN IMMUNODEFICIENCY VIRUS
TTYWGLHT

SEQ ID NO: 2527 - protein, 8 aa, HUMAN IMMUNODEFICIENCY VIRUS
HLGHGVSI

SEQ ID NO: 2528 - protein, 8 aa, HUMAN IMMUNODEFICIENCY VIRUS
HLGQGVSI

SEQ ID NO: 2529 - protein, 8 aa, HUMAN IMMUNODEFICIENCY VIRUS
GVSIEWRL

SEQ ID NO: 2530 - protein, 8 aa, HUMAN IMMUNODEFICIENCY VIRUS
STQIDPDL

SEQ ID NO: 2531 - protein, 8 aa, HUMAN IMMUNODEFICIENCY VIRUS
STQVDPGL

SEQ ID NO: 2532 - protein, 8 aa, HUMAN IMMUNODEFICIENCY VIRUS
TQIDPDLA

SEQ ID NO: 2533 - protein, 8 aa, HUMAN IMMUNODEFICIENCY VIRUS
TQVDPDLA

SEQ ID NO: 2534 - protein, 8 aa, HUMAN IMMUNODEFICIENCY VIRUS
TQVDPGLA

SEQ ID NO: 2535 - protein, 8 aa, HUMAN IMMUNODEFICIENCY VIRUS
LADQLIHL

SEQ ID NO: 2536 - protein, 8 aa, HUMAN IMMUNODEFICIENCY VIRUS
LADQLIHM

SEQ ID NO: 2537 - protein, 8 aa, HUMAN IMMUNODEFICIENCY VIRUS
SAIRKAIL

SEQ ID NO: 2538 - protein, 8 aa, HUMAN IMMUNODEFICIENCY VIRUS
SAIRNAIL

SEQ ID NO: 2539 - protein, 8 aa, HUMAN IMMUNODEFICIENCY VIRUS
YQAGHNKV

SEQ ID NO: 2540 - protein, 8 aa, HUMAN IMMUNODEFICIENCY VIRUS
KVGSLQYL

SEQ ID NO: 2541 - protein, 8 aa, HUMAN IMMUNODEFICIENCY VIRUS
SLQYLALA

SEQ ID NO: 2542 - protein, 8 aa, HUMAN IMMUNODEFICIENCY VIRUS
SLQYLALT

SEQ ID NO: 2543 - protein, 8 aa, HUMAN IMMUNODEFICIENCY VIRUS
LQYLALAA

SEQ ID NO: 2544 - protein, 8 aa, HUMAN IMMUNODEFICIENCY VIRUS
LQYLALKA

SEQ ID NO: 2545 - protein, 8 aa, HUMAN IMMUNODEFICIENCY VIRUS
LQYLALTA

SEQ ID NO: 2546 - protein, 8 aa, HUMAN IMMUNODEFICIENCY VIRUS
YLALTALI

SEQ ID NO: 2547 - protein, 8 aa, HUMAN IMMUNODEFICIENCY VIRUS
ALIKPKKI

SEQ ID NO: 2548 - protein, 8 aa, HUMAN IMMUNODEFICIENCY VIRUS
PLPSVKKL

SEQ ID NO: 2549 - protein, 8 aa, HUMAN IMMUNODEFICIENCY VIRUS
PLPSVRKL

SEQ ID NO: 2550 - protein, 9 aa, HUMAN IMMUNODEFICIENCY VIRUS
WQVMIVWQV

SEQ ID NO: 2551 - protein, 9 aa, HUMAN IMMUNODEFICIENCY VIRUS
MIVWQVDRM

SEQ ID NO: 2552 - protein, 9 aa, HUMAN IMMUNODEFICIENCY VIRUS
QVDRMKIRT

SEQ ID NO: 2553 - protein, 9 aa, HUMAN IMMUNODEFICIENCY VIRUS
QVDRMRINT

SEQ ID NO: 2554 - protein, 9 aa, HUMAN IMMUNODEFICIENCY VIRUS
QVDRMRIRT

SEQ ID NO: 2555 - protein, 9 aa, HUMAN IMMUNODEFICIENCY VIRUS
KIRTWNSLV

SEQ ID NO: 2556 - protein, 9 aa, HUMAN IMMUNODEFICIENCY VIRUS
RIRTWKSLV

SEQ ID NO: 2557 - protein, 9 aa, HUMAN IMMUNODEFICIENCY VIRUS
RIRTWNSLV

SEQ ID NO: 2558 - protein, 9 aa, HUMAN IMMUNODEFICIENCY VIRUS
SLVKHHMYI

SEQ ID NO: 2559 - protein, 9 aa, HUMAN IMMUNODEFICIENCY VIRUS
SLVKHHMYV

SEQ ID NO: 2560 - protein, 9 aa, HUMAN IMMUNODEFICIENCY VIRUS
EVHIPLGDA

SEQ ID NO: 2561 - protein, 9 aa, HUMAN IMMUNODEFICIENCY VIRUS
EVHIPLGEA

SEQ ID NO: 2562 - protein, 9 aa, HUMAN IMMUNODEFICIENCY VIRUS
HIPLGDARL

SEQ ID NO: 2563 - protein, 9 aa, HUMAN IMMUNODEFICIENCY VIRUS
HIPLGEARL

SEQ ID NO: 2564 - protein, 9 aa, HUMAN IMMUNODEFICIENCY VIRUS
PLGEARLVI

SEQ ID NO: 2565 - protein, 9 aa, HUMAN IMMUNODEFICIENCY VIRUS
LVIKTYWGL

SEQ ID NO: 2566 - protein, 9 aa, HUMAN IMMUNODEFICIENCY VIRUS
LVITTYWGL

SEQ ID NO: 2567 - protein, 9 aa, HUMAN IMMUNODEFICIENCY VIRUS
ITTYWGLHT

SEQ ID NO: 2568 - protein, 9 aa, HUMAN IMMUNODEFICIENCY VIRUS
HTGERDWHL

SEQ ID NO: 2569 - protein, 9 aa, HUMAN IMMUNODEFICIENCY VIRUS
QTGERDWHL

SEQ ID NO: 2570 - protein, 9 aa, HUMAN IMMUNODEFICIENCY VIRUS
STQIDPDLA

SEQ ID NO: 2571 - protein, 9 aa, HUMAN IMMUNODEFICIENCY VIRUS
STQVDPGLA

SEQ ID NO: 2572 - protein, 9 aa, HUMAN IMMUNODEFICIENCY VIRUS
DLADQLIHL

SEQ ID NO: 2573 - protein, 9 aa, HUMAN IMMUNODEFICIENCY VIRUS
GLADQLIHM

SEQ ID NO: 2574 - protein, 9 aa, HUMAN IMMUNODEFICIENCY VIRUS
KVGSLQYLA

SEQ ID NO: 2575 - protein, 9 aa, HUMAN IMMUNODEFICIENCY VIRUS
SLQYLALAA

SEQ ID NO: 2576 - protein, 9 aa, HUMAN IMMUNODEFICIENCY VIRUS
SLQYLALKA

SEQ ID NO: 2577 - protein, 9 aa, HUMAN IMMUNODEFICIENCY VIRUS
SLQYLALTA

SEQ ID NO: 2578 - protein, 9 aa, HUMAN IMMUNODEFICIENCY VIRUS
LQYLALAAL

SEQ ID NO: 2579 - protein, 9 aa, HUMAN IMMUNODEFICIENCY VIRUS
LQYLALKAL

SEQ ID NO: 2580 - protein, 9 aa, HUMAN IMMUNODEFICIENCY VIRUS
LQYLALTAL

SEQ ID NO: 2581 - protein, 9 aa, HUMAN IMMUNODEFICIENCY VIRUS
KIKPPLPSV

SEQ ID NO: 2582 - protein, 9 aa, HUMAN IMMUNODEFICIENCY VIRUS
KTKPPLPSV

SEQ ID NO: 2583 - protein, 9 aa, HUMAN IMMUNODEFICIENCY VIRUS
PLPSVKKLT

SEQ ID NO: 2584 - protein, 10 aa, HUMAN IMMUNODEFICIENCY VIRUS
VMIVWQVDRM

SEQ ID NO: 2585 - protein, 10 aa, HUMAN IMMUNODEFICIENCY VIRUS
IVWQVDRMKI

SEQ ID NO: 2586 - protein, 10 aa, HUMAN IMMUNODEFICIENCY VIRUS
IVWQVDRMRI

SEQ ID NO: 2587 - protein, 10 aa, HUMAN IMMUNODEFICIENCY VIRUS
WQVDRMKIRT

SEQ ID NO: 2588 - protein, 10 aa, HUMAN IMMUNODEFICIENCY VIRUS
WQVDRMRINT

SEQ ID NO: 2589 - protein, 10 aa, HUMAN IMMUNODEFICIENCY VIRUS
WQVDRMRIRT

SEQ ID NO: 2590 - protein, 10 aa, HUMAN IMMUNODEFICIENCY VIRUS
RMKIRTWNSL

SEQ ID NO: 2591 - protein, 10 aa, HUMAN IMMUNODEFICIENCY VIRUS
RMRIRTWKSL

SEQ ID NO: 2592 - protein, 10 aa, HUMAN IMMUNODEFICIENCY VIRUS
RMRIRTWNSL

SEQ ID NO: 2593 - protein, 10 aa, HUMAN IMMUNODEFICIENCY VIRUS
KISSEVHIPL

SEQ ID NO: 2594 - protein, 10 aa, HUMAN IMMUNODEFICIENCY VIRUS
KVSSEVHIPL

SEQ ID NO: 2595 - protein, 10 aa, HUMAN IMMUNODEFICIENCY VIRUS
RISSEVHIPL

SEQ ID NO: 2596 - protein, 10 aa, HUMAN IMMUNODEFICIENCY VIRUS
HIPLGDARLV

SEQ ID NO: 2597 - protein, 10 aa, HUMAN IMMUNODEFICIENCY VIRUS
HIPLGEARLV

SEQ ID NO: 2598 - protein, 10 aa, HUMAN IMMUNODEFICIENCY VIRUS
RLVITTYWGL

SEQ ID NO: 2599 - protein, 10 aa, HUMAN IMMUNODEFICIENCY VIRUS
VITTYWGLHT

SEQ ID NO: 2600 - protein, 10 aa, HUMAN IMMUNODEFICIENCY VIRUS
LQTGERDWHL

SEQ ID NO: 2601 - protein, 10 aa, HUMAN IMMUNODEFICIENCY VIRUS
QIDPDLADQL

SEQ ID NO: 2602 - protein, 10 aa, HUMAN IMMUNODEFICIENCY VIRUS
QVDPGLADQL

SEQ ID NO: 2603 - protein, 10 aa, HUMAN IMMUNODEFICIENCY VIRUS
IVSPRCEYQA

SEQ ID NO: 2604 - protein, 10 aa, HUMAN IMMUNODEFICIENCY VIRUS
QAGHNKVGSL

SEQ ID NO: 2605 - protein, 10 aa, HUMAN IMMUNODEFICIENCY VIRUS
KVGSLQYLAL

SEQ ID NO: 2606 - protein, 10 aa, HUMAN IMMUNODEFICIENCY VIRUS
SLQYLALAAL

SEQ ID NO: 2607 - protein, 10 aa, HUMAN IMMUNODEFICIENCY VIRUS
SLQYLALKAL

SEQ ID NO: 2608 - protein, 10 aa, HUMAN IMMUNODEFICIENCY VIRUS
SLQYLALTAL

SEQ ID NO: 2609 - protein, 10 aa, HUMAN IMMUNODEFICIENCY VIRUS
LQYLALTALI

SEQ ID NO: 2610 - protein, 10 aa, HUMAN IMMUNODEFICIENCY VIRUS
KTKGHRGSHT

SEQ ID NO: 2611 - protein, 11 aa, HUMAN IMMUNODEFICIENCY VIRUS
QVMIVWQVDRM

SEQ ID NO: 2612 - protein, 11 aa, HUMAN IMMUNODEFICIENCY VIRUS
MIVWQVDRMRI

SEQ ID NO: 2613 - protein, 11 aa, HUMAN IMMUNODEFICIENCY VIRUS
RMKIRTWNSLV

SEQ ID NO: 2614 - protein, 11 aa, HUMAN IMMUNODEFICIENCY VIRUS
RMRIRTWKSLV

SEQ ID NO: 2615 - protein, 11 aa, HUMAN IMMUNODEFICIENCY VIRUS
RMRIRTWNSLV

SEQ ID NO: 2616 - protein, 11 aa, HUMAN IMMUNODEFICIENCY VIRUS
RTWKSLVKHHM

SEQ ID NO: 2617 - protein, 11 aa, HUMAN IMMUNODEFICIENCY VIRUS
RTWNSLVKHHM

SEQ ID NO: 2618 - protein, 11 aa, HUMAN IMMUNODEFICIENCY VIRUS
EVHIPLGDARL

SEQ ID NO: 2619 - protein, 11 aa, HUMAN IMMUNODEFICIENCY VIRUS
EVHIPLGEARL

SEQ ID NO: 2620 - protein, 11 aa, HUMAN IMMUNODEFICIENCY VIRUS
HIPLGEARLVI

SEQ ID NO: 2621 - protein, 11 aa, HUMAN IMMUNODEFICIENCY VIRUS
LVITTYWGLHT

SEQ ID NO: 2622 - protein, 11 aa, HUMAN IMMUNODEFICIENCY VIRUS
GLHTGERDWHL

SEQ ID NO: 2623 - protein, 11 aa, HUMAN IMMUNODEFICIENCY VIRUS
GLQTGERDWHL

SEQ ID NO: 2624 - protein, 11 aa, HUMAN IMMUNODEFICIENCY VIRUS
TQIDPDLADQL

SEQ ID NO: 2625 - protein, 11 aa, HUMAN IMMUNODEFICIENCY VIRUS
TQVDPGLADQL

SEQ ID NO: 2626 - protein, 11 aa, HUMAN IMMUNODEFICIENCY VIRUS
QIDPDLADQLI

SEQ ID NO: 2627 - protein, 11 aa, HUMAN IMMUNODEFICIENCY VIRUS
QVDPGLADQLI

SEQ ID NO: 2628 - protein, 11 aa, HUMAN IMMUNODEFICIENCY VIRUS
YQAGHNKVGSL

SEQ ID NO: 2629 - protein, 11 aa, HUMAN IMMUNODEFICIENCY VIRUS
KVGSLQYLALA

SEQ ID NO: 2630 - protein, 11 aa, HUMAN IMMUNODEFICIENCY VIRUS
KVGSLQYLALT

SEQ ID NO: 2631 - protein, 11 aa, HUMAN IMMUNODEFICIENCY VIRUS
SLQYLALTALI

SEQ ID NO: 2632 - protein, 11 aa, HUMAN IMMUNODEFICIENCY VIRUS
LIKPKKIKPPL

SEQ ID NO: 2633 - protein, 11 aa, HUMAN IMMUNODEFICIENCY VIRUS
KTKGHRGSHTM

SEQ ID NO: 2634 - protein, 8 aa, HUMAN IMMUNODEFICIENCY VIRUS
ALELLEEL

SEQ ID NO: 2635 - protein, 8 aa, HUMAN IMMUNODEFICIENCY VIRUS
TLELLEEL

SEQ ID NO: 2636 - protein, 8 aa, HUMAN IMMUNODEFICIENCY VIRUS
AVRHFPRI

SEQ ID NO: 2637 - protein, 8 aa, HUMAN IMMUNODEFICIENCY VIRUS
ETYGDTWA

SEQ ID NO: 2638 - protein, 8 aa, HUMAN IMMUNODEFICIENCY VIRUS
ETYGDTWT

SEQ ID NO: 2639 - protein, 8 aa, HUMAN IMMUNODEFICIENCY VIRUS
DTWAGVEA

SEQ ID NO: 2640 - protein, 8 aa, HUMAN IMMUNODEFICIENCY VIRUS
DTWEGVEA

SEQ ID NO: 2641 - protein, 8 aa, HUMAN IMMUNODEFICIENCY VIRUS
WAGVEAII

SEQ ID NO: 2642 - protein, 8 aa, HUMAN IMMUNODEFICIENCY VIRUS
GVEAIIRI

SEQ ID NO: 2643 - protein, 8 aa, HUMAN IMMUNODEFICIENCY VIRUS
IIRILQQL

SEQ ID NO: 2644 - protein, 8 aa, HUMAN IMMUNODEFICIENCY VIRUS
ILQQLLFI

SEQ ID NO: 2645 - protein, 8 aa, HUMAN IMMUNODEFICIENCY VIRUS
LLFIHFRI

SEQ ID NO: 2646 - protein, 8 aa, HUMAN IMMUNODEFICIENCY VIRUS
LLFVHFRI

SEQ ID NO: 2647 - protein, 8 aa, HUMAN IMMUNODEFICIENCY VIRUS
CQHSRIGI

SEQ ID NO: 2648 - protein, 9 aa, HUMAN IMMUNODEFICIENCY VIRUS
WALELLEEL

SEQ ID NO: 2649 - protein, 9 aa, HUMAN IMMUNODEFICIENCY VIRUS
WTLELLEEL

SEQ ID NO: 2650 - protein, 9 aa, HUMAN IMMUNODEFICIENCY VIRUS
LLEELKNEA

SEQ ID NO: 2651 - protein, 9 aa, HUMAN IMMUNODEFICIENCY VIRUS
LLEELKSEA

SEQ ID NO: 2652 - protein, 9 aa, HUMAN IMMUNODEFICIENCY VIRUS
EAVRHFPRI

SEQ ID NO: 2653 - protein, 9 aa, HUMAN IMMUNODEFICIENCY VIRUS
WLHGLGQHI

SEQ ID NO: 2654 - protein, 9 aa, HUMAN IMMUNODEFICIENCY VIRUS
HIYETYGDT

SEQ ID NO: 2655 - protein, 9 aa, HUMAN IMMUNODEFICIENCY VIRUS
HIYNTYGDT

SEQ ID NO: 2656 - protein, 9 aa, HUMAN IMMUNODEFICIENCY VIRUS
YIYETYGDT

SEQ ID NO: 2657 - protein, 9 aa, HUMAN IMMUNODEFICIENCY VIRUS
DTWAGVEAI

SEQ ID NO: 2658 - protein, 9 aa, HUMAN IMMUNODEFICIENCY VIRUS
DTWEGVEAI

SEQ ID NO: 2659 - protein, 9 aa, HUMAN IMMUNODEFICIENCY VIRUS
GVEAIIRIL

SEQ ID NO: 2660 - protein, 9 aa, HUMAN IMMUNODEFICIENCY VIRUS
AIIRILQQL

SEQ ID NO: 2661 - protein, 9 aa, HUMAN IMMUNODEFICIENCY VIRUS
IIRILQQLL

SEQ ID NO: 2662 - protein, 9 aa, HUMAN IMMUNODEFICIENCY VIRUS
RILQQLLFI

SEQ ID NO: 2663 - protein, 9 aa, HUMAN IMMUNODEFICIENCY VIRUS
QLLFIHFRI

SEQ ID NO: 2664 - protein, 9 aa, HUMAN IMMUNODEFICIENCY VIRUS
QLLFVHFRI

SEQ ID NO: 2665 - protein, 9 aa, HUMAN IMMUNODEFICIENCY VIRUS
RIGCQHSRI

SEQ ID NO: 2666 - protein, 9 aa, HUMAN IMMUNODEFICIENCY VIRUS
RIGCRHSRI

SEQ ID NO: 2667 - protein, 9 aa, HUMAN IMMUNODEFICIENCY VIRUS
CQHSRIGII

SEQ ID NO: 2668 - protein, 9 aa, HUMAN IMMUNODEFICIENCY VIRUS
CQHSRIGIT

SEQ ID NO: 2669 - protein, 9 aa, HUMAN IMMUNODEFICIENCY VIRUS
RQRRARNGA

SEQ ID NO: 2670 - protein, 10 aa, HUMAN IMMUNODEFICIENCY VIRUS
PQREPYNEWT

SEQ ID NO: 2671 - protein, 10 aa, HUMAN IMMUNODEFICIENCY VIRUS
ELLEELKNEA

SEQ ID NO: 2672 - protein, 10 aa, HUMAN IMMUNODEFICIENCY VIRUS
ELLEELKSEA

SEQ ID NO: 2673 - protein, 10 aa, HUMAN IMMUNODEFICIENCY VIRUS
LLEELKNEAV

SEQ ID NO: 2674 - protein, 10 aa, HUMAN IMMUNODEFICIENCY VIRUS
LLEELKSEAV

SEQ ID NO: 2675 - protein, 10 aa, HUMAN IMMUNODEFICIENCY VIRUS
AVRHFPRIWL

SEQ ID NO: 2676 - protein, 10 aa, HUMAN IMMUNODEFICIENCY VIRUS
AVRHFPRPWL

SEQ ID NO: 2677 - protein, 10 aa, HUMAN IMMUNODEFICIENCY VIRUS
ETYGDTWAGV

SEQ ID NO: 2678 - protein, 10 aa, HUMAN IMMUNODEFICIENCY VIRUS
ETYGDTWTGV

SEQ ID NO: 2679 - protein, 10 aa, HUMAN IMMUNODEFICIENCY VIRUS
NTYGDTWEGV

SEQ ID NO: 2680 - protein, 10 aa, HUMAN IMMUNODEFICIENCY VIRUS
DTWAGVEAII

SEQ ID NO: 2681 - protein, 10 aa, HUMAN IMMUNODEFICIENCY VIRUS
DTWEGVEAII

SEQ ID NO: 2682 - protein, 10 aa, HUMAN IMMUNODEFICIENCY VIRUS
WAGVEAIIRI

SEQ ID NO: 2683 - protein, 10 aa, HUMAN IMMUNODEFICIENCY VIRUS
EAIIRILQQL

SEQ ID NO: 2684 - protein, 10 aa, HUMAN IMMUNODEFICIENCY VIRUS
AIIRILQQLL

SEQ ID NO: 2685 - protein, 10 aa, HUMAN IMMUNODEFICIENCY VIRUS
QQLLFIHFRI

SEQ ID NO: 2686 - protein, 10 aa, HUMAN IMMUNODEFICIENCY VIRUS
QQLLFVHFRI

SEQ ID NO: 2687 - protein, 11 aa, HUMAN IMMUNODEFICIENCY VIRUS
PQREPYNEWTL

SEQ ID NO: 2688 - protein, 11 aa, HUMAN IMMUNODEFICIENCY VIRUS
ELLEELKNEAV

SEQ ID NO: 2689 - protein, 11 aa, HUMAN IMMUNODEFICIENCY VIRUS
ELLEELKSEAV

SEQ ID NO: 2690 - protein, 11 aa, HUMAN IMMUNODEFICIENCY VIRUS
EAVRHFPRIWL

SEQ ID NO: 2691 - protein, 11 aa, HUMAN IMMUNODEFICIENCY VIRUS
EAVRHFPRPWL

SEQ ID NO: 2692 - protein, 11 aa, HUMAN IMMUNODEFICIENCY VIRUS
GQHIYETYGDT

SEQ ID NO: 2693 - protein, 11 aa, HUMAN IMMUNODEFICIENCY VIRUS
GQHIYNTYGDT

SEQ ID NO: 2694 - protein, 11 aa, HUMAN IMMUNODEFICIENCY VIRUS
GQYIYETYGDT

SEQ ID NO: 2695 - protein, 11 aa, HUMAN IMMUNODEFICIENCY VIRUS
WAGVEAIIRIL

SEQ ID NO: 2696 - protein, 11 aa, HUMAN IMMUNODEFICIENCY VIRUS
EAIIRILQQLL

SEQ ID NO: 2697 - protein, 11 aa, HUMAN IMMUNODEFICIENCY VIRUS
IIRILQQLLFI

SEQ ID NO: 2698 - protein, 11 aa, HUMAN IMMUNODEFICIENCY VIRUS
LQQLLFIHFRI

SEQ ID NO: 2699 - protein, 11 aa, HUMAN IMMUNODEFICIENCY VIRUS
LQQLLFVHFRI

SEQ ID NO: 2700 - protein, 11 aa, HUMAN IMMUNODEFICIENCY VIRUS
RIGCQHSRIGI

SEQ ID NO: 2701 - protein, 11 aa, HUMAN IMMUNODEFICIENCY VIRUS
RIGCRHSRIGI

SEQ ID NO: 2702 - protein, 10 aa, HUMAN IMMUNODEFICIENCY VIRUS
LPGRRGRNGA

SEQ ID NO: 2703 - protein, 8 aa, HUMAN IMMUNODEFICIENCY VIRUS
LAKVDYRI

SEQ ID NO: 2704 - protein, 8 aa, HUMAN IMMUNODEFICIENCY VIRUS
LAKVDYRL

SEQ ID NO: 2705 - protein, 8 aa, HUMAN IMMUNODEFICIENCY VIRUS
KVDYRIVI

SEQ ID NO: 2706 - protein, 8 aa, HUMAN IMMUNODEFICIENCY VIRUS
KVDYRLGV

SEQ ID NO: 2707 - protein, 8 aa, HUMAN IMMUNODEFICIENCY VIRUS
RIDYRLGV

SEQ ID NO: 2708 - protein, 8 aa, HUMAN IMMUNODEFICIENCY VIRUS
ILAIVALV

SEQ ID NO: 2709 - protein, 8 aa, HUMAN IMMUNODEFICIENCY VIRUS
LAIVALVV

SEQ ID NO: 2710 - protein, 8 aa, HUMAN IMMUNODEFICIENCY VIRUS
AIVALVVA

SEQ ID NO: 2711 - protein, 8 aa, HUMAN IMMUNODEFICIENCY VIRUS
IIAIVVWT

SEQ ID NO: 2712 - protein, 8 aa, HUMAN IMMUNODEFICIENCY VIRUS
IAIVVWTI

SEQ ID NO: 2713 - protein, 8 aa, HUMAN IMMUNODEFICIENCY VIRUS
AIVVWTIV

SEQ ID NO: 2714 - protein, 8 aa, HUMAN IMMUNODEFICIENCY VIRUS
VVWTIVFI

SEQ ID NO: 2715 - protein, 8 aa, HUMAN IMMUNODEFICIENCY VIRUS
KILRQRKI

SEQ ID NO: 2716 - protein, 8 aa, HUMAN IMMUNODEFICIENCY VIRUS
RQRKIDRL

SEQ ID NO: 2717 - protein, 8 aa, HUMAN IMMUNODEFICIENCY VIRUS
DQEELSAL

SEQ ID NO: 2718 - protein, 8 aa, HUMAN IMMUNODEFICIENCY VIRUS
GVEMGHHA

SEQ ID NO: 2719 - protein, 9 aa, HUMAN IMMUNODEFICIENCY VIRUS
LAKVDYRIV

SEQ ID NO: 2720 - protein, 9 aa, HUMAN IMMUNODEFICIENCY VIRUS
KVDYRIVIV

SEQ ID NO: 2721 - protein, 9 aa, HUMAN IMMUNODEFICIENCY VIRUS
ILAIVALVV

SEQ ID NO: 2722 - protein, 9 aa, HUMAN IMMUNODEFICIENCY VIRUS
LAIVALVVA

SEQ ID NO: 2723 - protein, 9 aa, HUMAN IMMUNODEFICIENCY VIRUS
IIAIVVWTI

SEQ ID NO: 2724 - protein, 9 aa, HUMAN IMMUNODEFICIENCY VIRUS
IAIVVWTIV

SEQ ID NO: 2725 - protein, 9 aa, HUMAN IMMUNODEFICIENCY VIRUS
IVVWTIVFI

SEQ ID NO: 2726 - protein, 9 aa, HUMAN IMMUNODEFICIENCY VIRUS
IVFIEYRKI

SEQ ID NO: 2727 - protein, 9 aa, HUMAN IMMUNODEFICIENCY VIRUS
RQRKIDRLI

SEQ ID NO: 2728 - protein, 9 aa, HUMAN IMMUNODEFICIENCY VIRUS
KIDRLIDRI

SEQ ID NO: 2729 - protein, 9 aa, HUMAN IMMUNODEFICIENCY VIRUS
LIDRIRERA

SEQ ID NO: 2730 - protein, 9 aa, HUMAN IMMUNODEFICIENCY VIRUS
DQEELSALV

SEQ ID NO: 2731 - protein, 9 aa, HUMAN IMMUNODEFICIENCY VIRUS
VTLLSSSKL

SEQ ID NO: 2732 - protein, 10 aa, HUMAN IMMUNODEFICIENCY VIRUS
LAKVDYRIVI

SEQ ID NO: 2733 - protein, 10 aa, HUMAN IMMUNODEFICIENCY VIRUS
LAKVDYRLGV

SEQ ID NO: 2734 - protein, 10 aa, HUMAN IMMUNODEFICIENCY VIRUS
KVDYRIVIVA

SEQ ID NO: 2735 - protein, 10 aa, HUMAN IMMUNODEFICIENCY VIRUS
KVDYRLGVGA

SEQ ID NO: 2736 - protein, 10 aa, HUMAN IMMUNODEFICIENCY VIRUS
RIDYRLGVGA

SEQ ID NO: 2737 - protein, 10 aa, HUMAN IMMUNODEFICIENCY VIRUS
IIAIVVWTIV

SEQ ID NO: 2738 - protein, 10 aa, HUMAN IMMUNODEFICIENCY VIRUS
AIVVWTIVFI

SEQ ID NO: 2739 - protein, 10 aa, HUMAN IMMUNODEFICIENCY VIRUS
ILRQRKIDRL

SEQ ID NO: 2740 - protein, 10 aa, HUMAN IMMUNODEFICIENCY VIRUS
LVTLLSSSKL

SEQ ID NO: 2741 - protein, 11 aa, HUMAN IMMUNODEFICIENCY VIRUS
LAKVDYRIVIV

SEQ ID NO: 2742 - protein, 11 aa, HUMAN IMMUNODEFICIENCY VIRUS
KVDYRLGVGAL

SEQ ID NO: 2743 - protein, 11 aa, HUMAN IMMUNODEFICIENCY VIRUS
RIDYRLGVGAL

SEQ ID NO: 2744 - protein, 11 aa, HUMAN IMMUNODEFICIENCY VIRUS
KILRQRKIDRL

SEQ ID NO: 2745 - protein, 11 aa, HUMAN IMMUNODEFICIENCY VIRUS
ILRQRKIDRLI

SEQ ID NO: 2746 - protein, 8 aa, HUMAN IMMUNODEFICIENCY VIRUS
SLWDQSLK

SEQ ID NO: 2747 - protein, 8 aa, HUMAN IMMUNODEFICIENCY VIRUS
QSLKPCVK

SEQ ID NO: 2748 - protein, 8 aa, HUMAN IMMUNODEFICIENCY VIRUS
AITQACPK

SEQ ID NO: 2749 - protein, 8 aa, HUMAN IMMUNODEFICIENCY VIRUS
TITQACPK

SEQ ID NO: 2750 - protein, 8 aa, HUMAN IMMUNODEFICIENCY VIRUS
VITQACPK

SEQ ID NO: 2751 - protein, 8 aa, HUMAN IMMUNODEFICIENCY VIRUS
PAGFAILK

SEQ ID NO: 2752 - protein, 8 aa, HUMAN IMMUNODEFICIENCY VIRUS
PAGYAILK

SEQ ID NO: 2753 - protein, 8 aa, HUMAN IMMUNODEFICIENCY VIRUS
AILKCNDK

SEQ ID NO: 2754 - protein, 8 aa, HUMAN IMMUNODEFICIENCY VIRUS
ILKCNDKK

SEQ ID NO: 2755 - protein, 8 aa, HUMAN IMMUNODEFICIENCY VIRUS
SVEINCTR

SEQ ID NO: 2756 - protein, 8 aa, HUMAN IMMUNODEFICIENCY VIRUS
GTAGNSSR

SEQ ID NO: 2757 - protein, 8 aa, HUMAN IMMUNODEFICIENCY VIRUS
TTHSFNCR

SEQ ID NO: 2758 - protein, 8 aa, HUMAN IMMUNODEFICIENCY VIRUS
ITLPCRIK

SEQ ID NO: 2759 - protein, 8 aa, HUMAN IMMUNODEFICIENCY VIRUS
NMWQEVGK

SEQ ID NO: 2760 - protein, 8 aa, HUMAN IMMUNODEFICIENCY VIRUS
ITGLLLTR

SEQ ID NO: 2761 - protein, 8 aa, HUMAN IMMUNODEFICIENCY VIRUS
RSELYKYK

SEQ ID NO: 2762 - protein, 8 aa, HUMAN IMMUNODEFICIENCY VIRUS
PLGVAPTK

SEQ ID NO: 2763 - protein, 8 aa, HUMAN IMMUNODEFICIENCY VIRUS
PLGVAPTR

SEQ ID NO: 2764 - protein, 8 aa, HUMAN IMMUNODEFICIENCY VIRUS
GVAPTKAK

SEQ ID NO: 2765 - protein, 8 aa, HUMAN IMMUNODEFICIENCY VIRUS
VAPTKAKR

SEQ ID NO: 2766 - protein, 8 aa, HUMAN IMMUNODEFICIENCY VIRUS
VISTRTHR

SEQ ID NO: 2767 - protein, 8 aa, HUMAN IMMUNODEFICIENCY VIRUS
STRTHREK

SEQ ID NO: 2768 - protein, 8 aa, HUMAN IMMUNODEFICIENCY VIRUS
RVVEREKR

SEQ ID NO: 2769 - protein, 8 aa, HUMAN IMMUNODEFICIENCY VIRUS
RVVQREKR

SEQ ID NO: 2770 - protein, 8 aa, HUMAN IMMUNODEFICIENCY VIRUS
ITLTVQAR

SEQ ID NO: 2771 - protein, 8 aa, HUMAN IMMUNODEFICIENCY VIRUS
EAQQHLLK

SEQ ID NO: 2772 - protein, 8 aa, HUMAN IMMUNODEFICIENCY VIRUS
KLTVWGIK

SEQ ID NO: 2773 - protein, 8 aa, HUMAN IMMUNODEFICIENCY VIRUS
QLTVWGIK

SEQ ID NO: 2774 - protein, 8 aa, HUMAN IMMUNODEFICIENCY VIRUS
GIKQLQAR

SEQ ID NO: 2775 - protein, 8 aa, HUMAN IMMUNODEFICIENCY VIRUS
LAVERYLK

SEQ ID NO: 2776 - protein, 8 aa, HUMAN IMMUNODEFICIENCY VIRUS
LAVERYLR

SEQ ID NO: 2777 - protein, 8 aa, HUMAN IMMUNODEFICIENCY VIRUS
GIWGCSGK

SEQ ID NO: 2778 - protein, 8 aa, HUMAN IMMUNODEFICIENCY VIRUS
MTWMEWER

SEQ ID NO: 2779 - protein, 8 aa, HUMAN IMMUNODEFICIENCY VIRUS
ESQNQQEK

SEQ ID NO: 2780 - protein, 8 aa, HUMAN IMMUNODEFICIENCY VIRUS
AVLSIVNR

SEQ ID NO: 2781 - protein, 8 aa, HUMAN IMMUNODEFICIENCY VIRUS
LSIVNRVR

SEQ ID NO: 2782 - protein, 8 aa, HUMAN IMMUNODEFICIENCY VIRUS
ALAWDDLR

SEQ ID NO: 2783 - protein, 8 aa, HUMAN IMMUNODEFICIENCY VIRUS
RIVELLGR

SEQ ID NO: 2784 - protein, 8 aa, HUMAN IMMUNODEFICIENCY VIRUS
IVELLGRR

SEQ ID NO: 2785 - protein, 8 aa, HUMAN IMMUNODEFICIENCY VIRUS
RLGWEGLK

SEQ ID NO: 2786 - protein, 8 aa, HUMAN IMMUNODEFICIENCY VIRUS
AVAEGTDR

SEQ ID NO: 2787 - protein, 8 aa, HUMAN IMMUNODEFICIENCY VIRUS
RAILHIPR

SEQ ID NO: 2788 - protein, 8 aa, HUMAN IMMUNODEFICIENCY VIRUS
AILHIPRR

SEQ ID NO: 2789 - protein, 8 aa, HUMAN IMMUNODEFICIENCY VIRUS
RIRQGLER

SEQ ID NO: 2790 - protein, 9 aa, HUMAN IMMUNODEFICIENCY VIRUS
TLFCASDAK

SEQ ID NO: 2791 - protein, 9 aa, HUMAN IMMUNODEFICIENCY VIRUS
VTENFNMWK

SEQ ID NO: 2792 - protein, 9 aa, HUMAN IMMUNODEFICIENCY VIRUS
ISLWDQSLK

SEQ ID NO: 2793 - protein, 9 aa, HUMAN IMMUNODEFICIENCY VIRUS
SAITQACPK

SEQ ID NO: 2794 - protein, 9 aa, HUMAN IMMUNODEFICIENCY VIRUS
STITQACPK

SEQ ID NO: 2795 - protein, 9 aa, HUMAN IMMUNODEFICIENCY VIRUS
SVITQACPK

SEQ ID NO: 2796 - protein, 9 aa, HUMAN IMMUNODEFICIENCY VIRUS
FAILKCNDK

SEQ ID NO: 2797 - protein, 9 aa, HUMAN IMMUNODEFICIENCY VIRUS
AILKCNDKK

SEQ ID NO: 2798 - protein, 9 aa, HUMAN IMMUNODEFICIENCY VIRUS
TVQCTHGIK

SEQ ID NO: 2799 - protein, 9 aa, HUMAN IMMUNODEFICIENCY VIRUS
TVQCTHGIR

SEQ ID NO: 2800 - protein, 9 aa, HUMAN IMMUNODEFICIENCY VIRUS
LAEEEVVIR

SEQ ID NO: 2801 - protein, 9 aa, HUMAN IMMUNODEFICIENCY VIRUS
CTRPNNNTR

SEQ ID NO: 2802 - protein, 9 aa, HUMAN IMMUNODEFICIENCY VIRUS
ITTHSFNCR

SEQ ID NO: 2803 - protein, 9 aa, HUMAN IMMUNODEFICIENCY VIRUS
NANITIPCR

SEQ ID NO: 2804 - protein, 9 aa, HUMAN IMMUNODEFICIENCY VIRUS
NITLPCRIK

SEQ ID NO: 2805 - protein, 9 aa, HUMAN IMMUNODEFICIENCY VIRUS
TITLPCRIK

SEQ ID NO: 2806 - protein, 9 aa, HUMAN IMMUNODEFICIENCY VIRUS
NITGLLLTR

SEQ ID NO: 2807 - protein, 9 aa, HUMAN IMMUNODEFICIENCY VIRUS
STNGTETFR

SEQ ID NO: 2808 - protein, 9 aa, HUMAN IMMUNODEFICIENCY VIRUS
ELYKYKVVK

SEQ ID NO: 2809 - protein, 9 aa, HUMAN IMMUNODEFICIENCY VIRUS
GVAPTKAKR

SEQ ID NO: 2810 - protein, 9 aa, HUMAN IMMUNODEFICIENCY VIRUS
VAPTKAKRR

SEQ ID NO: 2811 - protein, 9 aa, HUMAN IMMUNODEFICIENCY VIRUS
KAKRRVVQR

SEQ ID NO: 2812 - protein, 9 aa, HUMAN IMMUNODEFICIENCY VIRUS
IINIHTPHR

SEQ ID NO: 2813 - protein, 9 aa, HUMAN IMMUNODEFICIENCY VIRUS
ISTRTHREK

SEQ ID NO: 2814 - protein, 9 aa, HUMAN IMMUNODEFICIENCY VIRUS
NIHTPHREK

SEQ ID NO: 2815 - protein, 9 aa, HUMAN IMMUNODEFICIENCY VIRUS
STRTHREKR

SEQ ID NO: 2816 - protein, 9 aa, HUMAN IMMUNODEFICIENCY VIRUS
SITLTVQAR

SEQ ID NO: 2817 - protein, 9 aa, HUMAN IMMUNODEFICIENCY VIRUS
QARVLAVER

SEQ ID NO: 2818 - protein, 9 aa, HUMAN IMMUNODEFICIENCY VIRUS
VLAVERYLK

SEQ ID NO: 2819 - protein, 9 aa, HUMAN IMMUNODEFICIENCY VIRUS
VLAVERYLR

SEQ ID NO: 2820 - protein, 9 aa, HUMAN IMMUNODEFICIENCY VIRUS
NMTWMEWER

SEQ ID NO: 2821 - protein, 9 aa, HUMAN IMMUNODEFICIENCY VIRUS
ISNWLWYIK

SEQ ID NO: 2822 - protein, 9 aa, HUMAN IMMUNODEFICIENCY VIRUS
ITKWLWYIK

SEQ ID NO: 2823 - protein, 9 aa, HUMAN IMMUNODEFICIENCY VIRUS
ITNWLWYIK

SEQ ID NO: 2824 - protein, 9 aa, HUMAN IMMUNODEFICIENCY VIRUS
IVGGLIGLR

SEQ ID NO: 2825 - protein, 9 aa, HUMAN IMMUNODEFICIENCY VIRUS
FAVLSIVNR

SEQ ID NO: 2826 - protein, 9 aa, HUMAN IMMUNODEFICIENCY VIRUS
VLSIVNRVR

SEQ ID NO: 2827 - protein, 9 aa, HUMAN IMMUNODEFICIENCY VIRUS
GIEEEGGER

SEQ ID NO: 2828 - protein, 9 aa, HUMAN IMMUNODEFICIENCY VIRUS
LALAWDDLR

SEQ ID NO: 2829 - protein, 9 aa, HUMAN IMMUNODEFICIENCY VIRUS
NLCLFSYHR

SEQ ID NO: 2830 - protein, 9 aa, HUMAN IMMUNODEFICIENCY VIRUS
SLCLFSYHR

SEQ ID NO: 2831 - protein, 9 aa, HUMAN IMMUNODEFICIENCY VIRUS
CLFSYHRLR

SEQ ID NO: 2832 - protein, 9 aa, HUMAN IMMUNODEFICIENCY VIRUS
RIVELLGRR

SEQ ID NO: 2833 - protein, 9 aa, HUMAN IMMUNODEFICIENCY VIRUS
IAVAEGTDR

SEQ ID NO: 2834 - protein, 9 aa, HUMAN IMMUNODEFICIENCY VIRUS
RAILHIPRR

SEQ ID NO: 2835 - protein, 9 aa, HUMAN IMMUNODEFICIENCY VIRUS
ILHIPRRIR

SEQ ID NO: 2836 - protein, 10 aa, HUMAN IMMUNODEFICIENCY VIRUS
TVYYGVPVWK

SEQ ID NO: 2837 - protein, 10 aa, HUMAN IMMUNODEFICIENCY VIRUS
TTLFCASDAK

SEQ ID NO: 2838 - protein, 10 aa, HUMAN IMMUNODEFICIENCY VIRUS
NVTENFNMWK

SEQ ID NO: 2839 - protein, 10 aa, HUMAN IMMUNODEFICIENCY VIRUS
IISLWDQSLK

SEQ ID NO: 2840 - protein, 10 aa, HUMAN IMMUNODEFICIENCY VIRUS
TSAITQACPK

SEQ ID NO: 2841 - protein, 10 aa, HUMAN IMMUNODEFICIENCY VIRUS
TSVITQACPK

SEQ ID NO: 2842 - protein, 10 aa, HUMAN IMMUNODEFICIENCY VIRUS
CAPAGFAILK

SEQ ID NO: 2843 - protein, 10 aa, HUMAN IMMUNODEFICIENCY VIRUS
FAILKCNDKK

SEQ ID NO: 2844 - protein, 10 aa, HUMAN IMMUNODEFICIENCY VIRUS
STVQCTHGIK

SEQ ID NO: 2845 - protein, 10 aa, HUMAN IMMUNODEFICIENCY VIRUS
STVQCTHGIR

SEQ ID NO: 2846 - protein, 10 aa, HUMAN IMMUNODEFICIENCY VIRUS
SLAEEEVVIR

SEQ ID NO: 2847 - protein, 10 aa, HUMAN IMMUNODEFICIENCY VIRUS
CTRPNNNTRK

SEQ ID NO: 2848 - protein, 10 aa, HUMAN IMMUNODEFICIENCY VIRUS
ATGDIIGDIR

SEQ ID NO: 2849 - protein, 10 aa, HUMAN IMMUNODEFICIENCY VIRUS
EITTHSFNCR

SEQ ID NO: 2850 - protein, 10 aa, HUMAN IMMUNODEFICIENCY VIRUS
IINMWQEVGK

SEQ ID NO: 2851 - protein, 10 aa, HUMAN IMMUNODEFICIENCY VIRUS
GSENGTETFR

SEQ ID NO: 2852 - protein, 10 aa, HUMAN IMMUNODEFICIENCY VIRUS
PLGVAPTKAK

SEQ ID NO: 2853 - protein, 10 aa, HUMAN IMMUNODEFICIENCY VIRUS
GVAPTKAKRR

SEQ ID NO: 2854 - protein, 10 aa, HUMAN IMMUNODEFICIENCY VIRUS
VISTRTHREK

SEQ ID NO: 2855 - protein, 10 aa, HUMAN IMMUNODEFICIENCY VIRUS
ISTRTHREKR

SEQ ID NO: 2856 - protein, 10 aa, HUMAN IMMUNODEFICIENCY VIRUS
NIHTPHREKR

SEQ ID NO: 2857 - protein, 10 aa, HUMAN IMMUNODEFICIENCY VIRUS
ASITLTVQAR

SEQ ID NO: 2858 - protein, 10 aa, HUMAN IMMUNODEFICIENCY VIRUS
IVQQQNNLLR

SEQ ID NO: 2859 - protein, 10 aa, HUMAN IMMUNODEFICIENCY VIRUS
IVQQQSNLLR

SEQ ID NO: 2860 - protein, 10 aa, HUMAN IMMUNODEFICIENCY VIRUS
AIEAQQHLLK

SEQ ID NO: 2861 - protein, 10 aa, HUMAN IMMUNODEFICIENCY VIRUS
LLKLTVWGIK

SEQ ID NO: 2862 - protein, 10 aa, HUMAN IMMUNODEFICIENCY VIRUS
LLQLTVWGIK

SEQ ID NO: 2863 - protein, 10 aa, HUMAN IMMUNODEFICIENCY VIRUS
MLQLTVWGIK

SEQ ID NO: 2864 - protein, 10 aa, HUMAN IMMUNODEFICIENCY VIRUS
RVLAVERYLK

SEQ ID NO: 2865 - protein, 10 aa, HUMAN IMMUNODEFICIENCY VIRUS
RVLAVERYLR

SEQ ID NO: 2866 - protein, 10 aa, HUMAN IMMUNODEFICIENCY VIRUS
LLGIWGCSGK

SEQ ID NO: 2867 - protein, 10 aa, HUMAN IMMUNODEFICIENCY VIRUS
MIVGGLIGLR

SEQ ID NO: 2868 - protein, 10 aa, HUMAN IMMUNODEFICIENCY VIRUS
AVLSIVNRVR

SEQ ID NO: 2869 - protein, 10 aa, HUMAN IMMUNODEFICIENCY VIRUS
FLALAWDDLR

SEQ ID NO: 2870 - protein, 10 aa, HUMAN IMMUNODEFICIENCY VIRUS
RSLCLFSYHR

SEQ ID NO: 2871 - protein, 10 aa, HUMAN IMMUNODEFICIENCY VIRUS
GLRLGWEGLK

SEQ ID NO: 2872 - protein, 10 aa, HUMAN IMMUNODEFICIENCY VIRUS
LLQYWSQELK

SEQ ID NO: 2873 - protein, 10 aa, HUMAN IMMUNODEFICIENCY VIRUS
AIAVAEGTDR

SEQ ID NO: 2874 - protein, 10 aa, HUMAN IMMUNODEFICIENCY VIRUS
AILHIPRRIR

SEQ ID NO: 2875 - protein, 10 aa, HUMAN IMMUNODEFICIENCY VIRUS
PTRIRQGLER

SEQ ID NO: 2876 - protein, 11 aa, HUMAN IMMUNODEFICIENCY VIRUS
VTVYYGVPVWK

SEQ ID NO: 2877 - protein, 11 aa, HUMAN IMMUNODEFICIENCY VIRUS
KTTLFCASDAK

SEQ ID NO: 2878 - protein, 11 aa, HUMAN IMMUNODEFICIENCY VIRUS
TTTLFCASDAK

SEQ ID NO: 2879 - protein, 11 aa, HUMAN IMMUNODEFICIENCY VIRUS
DIISLWDQSLK

SEQ ID NO: 2880 - protein, 11 aa, HUMAN IMMUNODEFICIENCY VIRUS
NTSAITQACPK

SEQ ID NO: 2881 - protein, 11 aa, HUMAN IMMUNODEFICIENCY VIRUS
NTSVITQACPK

SEQ ID NO: 2882 - protein, 11 aa, HUMAN IMMUNODEFICIENCY VIRUS
VSTVQCTHGIK

SEQ ID NO: 2883 - protein, 11 aa, HUMAN IMMUNODEFICIENCY VIRUS
VSTVQCTHGIR

SEQ ID NO: 2884 - protein, 11 aa, HUMAN IMMUNODEFICIENCY VIRUS
GSLAEEEVVIR

SEQ ID NO: 2885 - protein, 11 aa, HUMAN IMMUNODEFICIENCY VIRUS
YATGDIIGDIR

SEQ ID NO: 2886 - protein, 11 aa, HUMAN IMMUNODEFICIENCY VIRUS
KLREIRQFENK

SEQ ID NO: 2887 - protein, 11 aa, HUMAN IMMUNODEFICIENCY VIRUS
HTEGNITLQCR

SEQ ID NO: 2888 - protein, 11 aa, HUMAN IMMUNODEFICIENCY VIRUS
NANITIPCRIK

SEQ ID NO: 2889 - protein, 11 aa, HUMAN IMMUNODEFICIENCY VIRUS
QIINMWQEVGK

SEQ ID NO: 2890 - protein, 11 aa, HUMAN IMMUNODEFICIENCY VIRUS
SSNITGLLLTR

SEQ ID NO: 2891 - protein, 11 aa, HUMAN IMMUNODEFICIENCY VIRUS
NTETNKTETFR

SEQ ID NO: 2892 - protein, 11 aa, HUMAN IMMUNODEFICIENCY VIRUS
NTTGNTTETFR

SEQ ID NO: 2893 - protein, 11 aa, HUMAN IMMUNODEFICIENCY VIRUS
EIFRPGGGDMR

SEQ ID NO: 2894 - protein, 11 aa, HUMAN IMMUNODEFICIENCY VIRUS
ETFRPGGGDMR

SEQ ID NO: 2895 - protein, 11 aa, HUMAN IMMUNODEFICIENCY VIRUS
RSELYKYKVVK

SEQ ID NO: 2896 - protein, 11 aa, HUMAN IMMUNODEFICIENCY VIRUS
KIEPLGVAPTK

SEQ ID NO: 2897 - protein, 11 aa, HUMAN IMMUNODEFICIENCY VIRUS
PLGVAPTKAKR

SEQ ID NO: 2898 - protein, 11 aa, HUMAN IMMUNODEFICIENCY VIRUS
PTKAKRRVVQR

SEQ ID NO: 2899 - protein, 11 aa, HUMAN IMMUNODEFICIENCY VIRUS
KAKRRVVQREK

SEQ ID NO: 2900 - protein, 11 aa, HUMAN IMMUNODEFICIENCY VIRUS
IINIHTPHREK

SEQ ID NO: 2901 - protein, 11 aa, HUMAN IMMUNODEFICIENCY VIRUS
VISTRTHREKR

SEQ ID NO: 2902 - protein, 11 aa, HUMAN IMMUNODEFICIENCY VIRUS
AASITLTVQAR

SEQ ID NO: 2903 - protein, 11 aa, HUMAN IMMUNODEFICIENCY VIRUS
GIVQQQNNLLR

SEQ ID NO: 2904 - protein, 11 aa, HUMAN IMMUNODEFICIENCY VIRUS
GIVQQQSNLLR

SEQ ID NO: 2905 - protein, 11 aa, HUMAN IMMUNODEFICIENCY VIRUS
HLLKLTVWGIK

SEQ ID NO: 2906 - protein, 11 aa, HUMAN IMMUNODEFICIENCY VIRUS
HLLQLTVWGIK

SEQ ID NO: 2907 - protein, 11 aa, HUMAN IMMUNODEFICIENCY VIRUS
TVWGIKQLQAR

SEQ ID NO: 2908 - protein, 11 aa, HUMAN IMMUNODEFICIENCY VIRUS
QLQARVLAVER

SEQ ID NO: 2909 - protein, 11 aa, HUMAN IMMUNODEFICIENCY VIRUS
QLLGIWGCSGK

SEQ ID NO: 2910 - protein, 11 aa, HUMAN IMMUNODEFICIENCY VIRUS
NVPWNSSWSNK

SEQ ID NO: 2911 - protein, 11 aa, HUMAN IMMUNODEFICIENCY VIRUS
LIEESQNQQEK

SEQ ID NO: 2912 - protein, 11 aa, HUMAN IMMUNODEFICIENCY VIRUS
IMIVGGLIGLR

SEQ ID NO: 2913 - protein, 11 aa, HUMAN IMMUNODEFICIENCY VIRUS
IIFAVLSIVNR

SEQ ID NO: 2914 - protein, 11 aa, HUMAN IMMUNODEFICIENCY VIRUS
IVFAVLSIVNR

SEQ ID NO: 2915 - protein, 11 aa, HUMAN IMMUNODEFICIENCY VIRUS
FAVLSIVNRVR

SEQ ID NO: 2916 - protein, 11 aa, HUMAN IMMUNODEFICIENCY VIRUS
GIEEEGGERDR

SEQ ID NO: 2917 - protein, 11 aa, HUMAN IMMUNODEFICIENCY VIRUS
NLCLFSYHRLR

SEQ ID NO: 2918 - protein, 11 aa, HUMAN IMMUNODEFICIENCY VIRUS
SLCLFSYHRLR

SEQ ID NO: 2919 - protein, 11 aa, HUMAN IMMUNODEFICIENCY VIRUS
LLGRRGWEALK

SEQ ID NO: 2920 - protein, 11 aa, HUMAN IMMUNODEFICIENCY VIRUS
NLLQYWSQELK

SEQ ID NO: 2921 - protein, 11 aa, HUMAN IMMUNODEFICIENCY VIRUS
IAIAVAEGTDR

SEQ ID NO: 2922 - protein, 11 aa, HUMAN IMMUNODEFICIENCY VIRUS
TAIAVAEGTDR

SEQ ID NO: 2923 - protein, 11 aa, HUMAN IMMUNODEFICIENCY VIRUS
RAILHIPRRIR

SEQ ID NO: 2924 - protein, 8 aa, HUMAN IMMUNODEFICIENCY VIRUS
GARASILR

SEQ ID NO: 2925 - protein, 8 aa, HUMAN IMMUNODEFICIENCY VIRUS
ASVLSGGK

SEQ ID NO: 2926 - protein, 8 aa, HUMAN IMMUNODEFICIENCY VIRUS
RLRPGGKK

SEQ ID NO: 2927 - protein, 8 aa, HUMAN IMMUNODEFICIENCY VIRUS
WASRELER

SEQ ID NO: 2928 - protein, 8 aa, HUMAN IMMUNODEFICIENCY VIRUS
QTGSEELR

SEQ ID NO: 2929 - protein, 8 aa, HUMAN IMMUNODEFICIENCY VIRUS
TLYCVHQK

SEQ ID NO: 2930 - protein, 8 aa, HUMAN IMMUNODEFICIENCY VIRUS
TLYCVHQR

SEQ ID NO: 2931 - protein, 8 aa, HUMAN IMMUNODEFICIENCY VIRUS
RIEVKDTK

SEQ ID NO: 2932 - protein, 8 aa, HUMAN IMMUNODEFICIENCY VIRUS
DTKEALDK

SEQ ID NO: 2933 - protein, 8 aa, HUMAN IMMUNODEFICIENCY VIRUS
DTKEALEK

SEQ ID NO: 2934 - protein, 8 aa, HUMAN IMMUNODEFICIENCY VIRUS
KIEEEQNK

SEQ ID NO: 2935 - protein, 8 aa, HUMAN IMMUNODEFICIENCY VIRUS
PAAADKEK

SEQ ID NO: 2936 - protein, 8 aa, HUMAN IMMUNODEFICIENCY VIRUS
RTLNAWVK

SEQ ID NO: 2937 - protein, 8 aa, HUMAN IMMUNODEFICIENCY VIRUS
WVKVIEEK

SEQ ID NO: 2938 - protein, 8 aa, HUMAN IMMUNODEFICIENCY VIRUS
WVKVVEEK

SEQ ID NO: 2939 - protein, 8 aa, HUMAN IMMUNODEFICIENCY VIRUS
QAAMQMLK

SEQ ID NO: 2940 - protein, 8 aa, HUMAN IMMUNODEFICIENCY VIRUS
PIAPGQMR

SEQ ID NO: 2941 - protein, 8 aa, HUMAN IMMUNODEFICIENCY VIRUS
PIPPGQMR

SEQ ID NO: 2942 - protein, 8 aa, HUMAN IMMUNODEFICIENCY VIRUS
PVAPGQMR

SEQ ID NO: 2943 - protein, 8 aa, HUMAN IMMUNODEFICIENCY VIRUS
PVGDIYKR

SEQ ID NO: 2944 - protein, 8 aa, HUMAN IMMUNODEFICIENCY VIRUS
PVGEIYKR

SEQ ID NO: 2945 - protein, 8 aa, HUMAN IMMUNODEFICIENCY VIRUS
WIILGLNK

SEQ ID NO: 2946 - protein, 8 aa, HUMAN IMMUNODEFICIENCY VIRUS
PTSILDIR

SEQ ID NO: 2947 - protein, 8 aa, HUMAN IMMUNODEFICIENCY VIRUS
PVSILDIK

SEQ ID NO: 2948 - protein, 8 aa, HUMAN IMMUNODEFICIENCY VIRUS
PVSILDIR

SEQ ID NO: 2949 - protein, 8 aa, HUMAN IMMUNODEFICIENCY VIRUS
GVGGPGHK

SEQ ID NO: 2950 - protein, 8 aa, HUMAN IMMUNODEFICIENCY VIRUS
GVGGPSHK

SEQ ID NO: 2951 - protein, 8 aa, HUMAN IMMUNODEFICIENCY VIRUS
ASAQQDLK

SEQ ID NO: 2952 - protein, 8 aa, HUMAN IMMUNODEFICIENCY VIRUS
ATAQQDLK

SEQ ID NO: 2953 - protein, 8 aa, HUMAN IMMUNODEFICIENCY VIRUS
AAAIMMQK

SEQ ID NO: 2954 - protein, 8 aa, HUMAN IMMUNODEFICIENCY VIRUS
AAAIMMQK

SEQ ID NO: 2955 - protein, 8 aa, HUMAN IMMUNODEFICIENCY VIRUS
SATIMMQR

SEQ ID NO: 2956 - protein, 8 aa, HUMAN IMMUNODEFICIENCY VIRUS
YTAVFMQR

SEQ ID NO: 2957 - protein, 8 aa, HUMAN IMMUNODEFICIENCY VIRUS
MMQKSNFK

SEQ ID NO: 2958 - protein, 8 aa, HUMAN IMMUNODEFICIENCY VIRUS
MMQRGNFK

SEQ ID NO: 2959 - protein, 8 aa, HUMAN IMMUNODEFICIENCY VIRUS
MMQRGNFR

SEQ ID NO: 2960 - protein, 8 aa, HUMAN IMMUNODEFICIENCY VIRUS
QMKDCTER

SEQ ID NO: 2961 - protein, 9 aa, HUMAN IMMUNODEFICIENCY VIRUS
RASVLSGGK

SEQ ID NO: 2962 - protein, 9 aa, HUMAN IMMUNODEFICIENCY VIRUS
KLDAWEKIR

SEQ ID NO: 2963 - protein, 9 aa, HUMAN IMMUNODEFICIENCY VIRUS
KLDKWEKIR

SEQ ID NO: 2964 - protein, 9 aa, HUMAN IMMUNODEFICIENCY VIRUS
DAWEKIRLR

SEQ ID NO: 2965 - protein, 9 aa, HUMAN IMMUNODEFICIENCY VIRUS
KIRLRPGGK

SEQ ID NO: 2966 - protein, 9 aa, HUMAN IMMUNODEFICIENCY VIRUS
RLRPGGKKK

SEQ ID NO: 2967 - protein, 9 aa, HUMAN IMMUNODEFICIENCY VIRUS
LLETSEGCR

SEQ ID NO: 2968 - protein, 9 aa, HUMAN IMMUNODEFICIENCY VIRUS
ATLYCVHQK

SEQ ID NO: 2969 - protein, 9 aa, HUMAN IMMUNODEFICIENCY VIRUS
ATLYCVHQR

SEQ ID NO: 2970 - protein, 9 aa, HUMAN IMMUNODEFICIENCY VIRUS
MVHQAISPR

SEQ ID NO: 2971 - protein, 9 aa, HUMAN IMMUNODEFICIENCY VIRUS
PIPVGEIYK

SEQ ID NO: 2972 - protein, 9 aa, HUMAN IMMUNODEFICIENCY VIRUS
ILGLNKIVR

SEQ ID NO: 2973 - protein, 9 aa, HUMAN IMMUNODEFICIENCY VIRUS
ILDIKQGPK

SEQ ID NO: 2974 - protein, 9 aa, HUMAN IMMUNODEFICIENCY VIRUS
ILDIRQGPK

SEQ ID NO: 2975 - protein, 9 aa, HUMAN IMMUNODEFICIENCY VIRUS
NSATIMMQR

SEQ ID NO: 2976 - protein, 9 aa, HUMAN IMMUNODEFICIENCY VIRUS
IMMQKSNFK

SEQ ID NO: 2977 - protein, 9 aa, HUMAN IMMUNODEFICIENCY VIRUS
IMMQRGNFR

SEQ ID NO: 2978 - protein, 9 aa, HUMAN IMMUNODEFICIENCY VIRUS
IVKCFNCGK

SEQ ID NO: 2979 - protein, 9 aa, HUMAN IMMUNODEFICIENCY VIRUS
TIKCFNCGK

SEQ ID NO: 2980 - protein, 9 aa, HUMAN IMMUNODEFICIENCY VIRUS
TVKCFNCGK

SEQ ID NO: 2981 - protein, 9 aa, HUMAN IMMUNODEFICIENCY VIRUS
IAKNCRAPR

SEQ ID NO: 2982 - protein, 9 aa, HUMAN IMMUNODEFICIENCY VIRUS
IARNCRAPR

SEQ ID NO: 2983 - protein, 9 aa, HUMAN IMMUNODEFICIENCY VIRUS
LARNCRAPR

SEQ ID NO: 2984 - protein, 9 aa, HUMAN IMMUNODEFICIENCY VIRUS
KIWPSHKGR

SEQ ID NO: 2985 - protein, 9 aa, HUMAN IMMUNODEFICIENCY VIRUS
KIWPSNKGR

SEQ ID NO: 2986 - protein, 9 aa, HUMAN IMMUNODEFICIENCY VIRUS
KIWPSSKGR

SEQ ID NO: 2987 - protein, 9 aa, HUMAN IMMUNODEFICIENCY VIRUS
TAPPEESFR

SEQ ID NO: 2988 - protein, 9 aa, HUMAN IMMUNODEFICIENCY VIRUS
TAPPAESFR

SEQ ID NO: 2989 - protein, 9 aa, HUMAN IMMUNODEFICIENCY VIRUS
TAPPPESFR

SEQ ID NO: 2990 - protein, 10 aa, HUMAN IMMUNODEFICIENCY VIRUS
KIRLRPGGKK

SEQ ID NO: 2991 - protein, 10 aa, HUMAN IMMUNODEFICIENCY VIRUS
KLKHIVWASR

SEQ ID NO: 2992 - protein, 10 aa, HUMAN IMMUNODEFICIENCY VIRUS
RLKHLVWASR

SEQ ID NO: 2993 - protein, 10 aa, HUMAN IMMUNODEFICIENCY VIRUS
IVWASRELER

SEQ ID NO: 2994 - protein, 10 aa, HUMAN IMMUNODEFICIENCY VIRUS
LVWASRELER

SEQ ID NO: 2995 - protein, 10 aa, HUMAN IMMUNODEFICIENCY VIRUS
GLLETSEGCR

SEQ ID NO: 2996 - protein, 10 aa, HUMAN IMMUNODEFICIENCY VIRUS
VATLYCVHQK

SEQ ID NO: 2997 - protein, 10 aa, HUMAN IMMUNODEFICIENCY VIRUS
VATLYCVHQR

SEQ ID NO: 2998 - protein, 10 aa, HUMAN IMMUNODEFICIENCY VIRUS
KIEEEQNKSK

SEQ ID NO: 2999 - protein, 10 aa, HUMAN IMMUNODEFICIENCY VIRUS
QMVHQAISPR

SEQ ID NO: 3000 - protein, 10 aa, HUMAN IMMUNODEFICIENCY VIRUS
NAWVKVIEEK

SEQ ID NO: 3001 - protein, 10 aa, HUMAN IMMUNODEFICIENCY VIRUS
NAWVKVVEEK

SEQ ID NO: 3002 - protein, 10 aa, HUMAN IMMUNODEFICIENCY VIRUS
IAPGQMREPR

SEQ ID NO: 3003 - protein, 10 aa, HUMAN IMMUNODEFICIENCY VIRUS
PIPVGEIYKR

SEQ ID NO: 3004 - protein, 10 aa, HUMAN IMMUNODEFICIENCY VIRUS
IILGLNKIVR

SEQ ID NO: 3005 - protein, 10 aa, HUMAN IMMUNODEFICIENCY VIRUS
YSPTSILDIR

SEQ ID NO: 3006 - protein, 10 aa, HUMAN IMMUNODEFICIENCY VIRUS
YSPVSILDIK

SEQ ID NO: 3007 - protein, 10 aa, HUMAN IMMUNODEFICIENCY VIRUS
YSPVSILDIR

SEQ ID NO: 3008 - protein, 10 aa, HUMAN IMMUNODEFICIENCY VIRUS
SILDIKQGPK

SEQ ID NO: 3009 - protein, 10 aa, HUMAN IMMUNODEFICIENCY VIRUS
SILDIRQGPK

SEQ ID NO: 3010 - protein, 10 aa, HUMAN IMMUNODEFICIENCY VIRUS
YVDRFFKTLR

SEQ ID NO: 3011 - protein, 10 aa, HUMAN IMMUNODEFICIENCY VIRUS
YVDRFYKTLR

SEQ ID NO: 3012 - protein, 10 aa, HUMAN IMMUNODEFICIENCY VIRUS
RAEQASQEVK

SEQ ID NO: 3013 - protein, 10 aa, HUMAN IMMUNODEFICIENCY VIRUS
RAEQATQDVK

SEQ ID NO: 3014 - protein, 10 aa, HUMAN IMMUNODEFICIENCY VIRUS
RAEQATQEVK

SEQ ID NO: 3015 - protein, 10 aa, HUMAN IMMUNODEFICIENCY VIRUS
LVQNANPDCK

SEQ ID NO: 3016 - protein, 10 aa, HUMAN IMMUNODEFICIENCY VIRUS
GVGGPGHKAR

SEQ ID NO: 3017 - protein, 10 aa, HUMAN IMMUNODEFICIENCY VIRUS
GVGGPSHKAR

SEQ ID NO: 3018 - protein, 10 aa, HUMAN IMMUNODEFICIENCY VIRUS
TIMMQRGNFR

SEQ ID NO: 3019 - protein, 10 aa, HUMAN IMMUNODEFICIENCY VIRUS
KTVKCFNCGK

SEQ ID NO: 3020 - protein, 10 aa, HUMAN IMMUNODEFICIENCY VIRUS
HIAKNCRAPR

SEQ ID NO: 3021 - protein, 10 aa, HUMAN IMMUNODEFICIENCY VIRUS
HIARNCRAPR

SEQ ID NO: 3022 - protein, 10 aa, HUMAN IMMUNODEFICIENCY VIRUS
HLARNCRAPR

SEQ ID NO: 3023 - protein, 10 aa, HUMAN IMMUNODEFICIENCY VIRUS
IAKNCRAPRK

SEQ ID NO: 3024 - protein, 10 aa, HUMAN IMMUNODEFICIENCY VIRUS
IARNCRAPRK

SEQ ID NO: 3025 - protein, 10 aa, HUMAN IMMUNODEFICIENCY VIRUS
LARNCRAPRK

SEQ ID NO: 3026 - protein, 10 aa, HUMAN IMMUNODEFICIENCY VIRUS
RAPRKKGCWK

SEQ ID NO: 3027 - protein, 10 aa, HUMAN IMMUNODEFICIENCY VIRUS
FLGKIWPSHK

SEQ ID NO: 3028 - protein, 10 aa, HUMAN IMMUNODEFICIENCY VIRUS
FLGKIWPSNK

SEQ ID NO: 3029 - protein, 10 aa, HUMAN IMMUNODEFICIENCY VIRUS
FLGKIWPSSK

SEQ ID NO: 3030 - protein, 10 aa, HUMAN IMMUNODEFICIENCY VIRUS
GTRPGNYVQK

SEQ ID NO: 3031 - protein, 10 aa, HUMAN IMMUNODEFICIENCY VIRUS
GTRPGNYVQR

SEQ ID NO: 3032 - protein, 10 aa, HUMAN IMMUNODEFICIENCY VIRUS
PTAPPEESFR

SEQ ID NO: 3033 - protein, 10 aa, HUMAN IMMUNODEFICIENCY VIRUS
PTAPPAESFR

SEQ ID NO: 3034 - protein, 10 aa, HUMAN IMMUNODEFICIENCY VIRUS
PTAPPPESFR

SEQ ID NO: 3035 - protein, 10 aa, HUMAN IMMUNODEFICIENCY VIRUS
ITSLPKQEQK

SEQ ID NO: 3036 - protein, 10 aa, HUMAN IMMUNODEFICIENCY VIRUS
PSQKQEPIDK

SEQ ID NO: 3037 - protein, 11 aa, HUMAN IMMUNODEFICIENCY VIRUS
GARASVLSGGK

SEQ ID NO: 3038 - protein, 11 aa, HUMAN IMMUNODEFICIENCY VIRUS
LSGGKLDAWEK

SEQ ID NO: 3039 - protein, 11 aa, HUMAN IMMUNODEFICIENCY VIRUS
KLDAWEKIRLR

SEQ ID NO: 3040 - protein, 11 aa, HUMAN IMMUNODEFICIENCY VIRUS
KLDKWEKIRLR

SEQ ID NO: 3041 - protein, 11 aa, HUMAN IMMUNODEFICIENCY VIRUS
KIRLRPGGKKK

SEQ ID NO: 3042 - protein, 11 aa, HUMAN IMMUNODEFICIENCY VIRUS
RLRPGGKKKYK

SEQ ID NO: 3043 - protein, 11 aa, HUMAN IMMUNODEFICIENCY VIRUS
RLRPGGKKKYR

SEQ ID NO: 3044 - protein, 11 aa, HUMAN IMMUNODEFICIENCY VIRUS
HIVWASRELER

SEQ ID NO: 3045 - protein, 11 aa, HUMAN IMMUNODEFICIENCY VIRUS
HLVWASRELER

SEQ ID NO: 3046 - protein, 11 aa, HUMAN IMMUNODEFICIENCY VIRUS
TVATLYCVHQK

SEQ ID NO: 3047 - protein, 11 aa, HUMAN IMMUNODEFICIENCY VIRUS
TVATLYCVHQR

SEQ ID NO: 3048 - protein, 11 aa, HUMAN IMMUNODEFICIENCY VIRUS
EVKDTKEALDK

SEQ ID NO: 3049 - protein, 11 aa, HUMAN IMMUNODEFICIENCY VIRUS
ALDKIEEEQNK

SEQ ID NO: 3050 - protein, 11 aa, HUMAN IMMUNODEFICIENCY VIRUS
KIEEEQNKSKK

SEQ ID NO: 3051 - protein, 11 aa, HUMAN IMMUNODEFICIENCY VIRUS
PAAADKEKDSK

SEQ ID NO: 3052 - protein, 11 aa, HUMAN IMMUNODEFICIENCY VIRUS
ISPRTLNAWVK

SEQ ID NO: 3053 - protein, 11 aa, HUMAN IMMUNODEFICIENCY VIRUS
LSPRTLNAWVK

SEQ ID NO: 3054 - protein, 11 aa, HUMAN IMMUNODEFICIENCY VIRUS
TINEEAAEWDR

SEQ ID NO: 3055 - protein, 11 aa, HUMAN IMMUNODEFICIENCY VIRUS
HAGPIAPGQMR

SEQ ID NO: 3056 - protein, 11 aa, HUMAN IMMUNODEFICIENCY VIRUS
HAGPIPPGQMR

SEQ ID NO: 3057 - protein, 11 aa, HUMAN IMMUNODEFICIENCY VIRUS
PIAPGQMREPR

SEQ ID NO: 3058 - protein, 11 aa, HUMAN IMMUNODEFICIENCY VIRUS
PIPPGQMREPR

SEQ ID NO: 3059 - protein, 11 aa, HUMAN IMMUNODEFICIENCY VIRUS
WIILGLNKIVR

SEQ ID NO: 3060 - protein, 11 aa, HUMAN IMMUNODEFICIENCY VIRUS
TSILDIRQGPK

SEQ ID NO: 3061 - protein, 11 aa, HUMAN IMMUNODEFICIENCY VIRUS
VSILDIKQGPK

SEQ ID NO: 3062 - protein, 11 aa, HUMAN IMMUNODEFICIENCY VIRUS
VSILDIRQGPK

SEQ ID NO: 3063 - protein, 11 aa, HUMAN IMMUNODEFICIENCY VIRUS
DIKQGPKEPFR

SEQ ID NO: 3064 - protein, 11 aa, HUMAN IMMUNODEFICIENCY VIRUS
DIRQGPKEPFR

SEQ ID NO: 3065 - protein, 11 aa, HUMAN IMMUNODEFICIENCY VIRUS
LLVQNANPDCK

SEQ ID NO: 3066 - protein, 11 aa, HUMAN IMMUNODEFICIENCY VIRUS
NANPDCKTILK

SEQ ID NO: 3067 - protein, 11 aa, HUMAN IMMUNODEFICIENCY VIRUS
NANPDCKTILR

SEQ ID NO: 3068 - protein, 11 aa, HUMAN IMMUNODEFICIENCY VIRUS
AAIMMQKSNFK

SEQ ID NO: 3069 - protein, 11 aa, HUMAN IMMUNODEFICIENCY VIRUS
ATIMMQRGNFR

SEQ ID NO: 3070 - protein, 11 aa, HUMAN IMMUNODEFICIENCY VIRUS
MMQRGNFRNQR

SEQ ID NO: 3071 - protein, 11 aa, HUMAN IMMUNODEFICIENCY VIRUS
HIAKNCRAPRK

SEQ ID NO: 3072 - protein, 11 aa, HUMAN IMMUNODEFICIENCY VIRUS
HIARNCRAPRK

SEQ ID NO: 3073 - protein, 11 aa, HUMAN IMMUNODEFICIENCY VIRUS
HLARNCRAPRK

SEQ ID NO: 3074 - protein, 11 aa, HUMAN IMMUNODEFICIENCY VIRUS
IAKNCRAPRKK

SEQ ID NO: 3075 - protein, 11 aa, HUMAN IMMUNODEFICIENCY VIRUS
IARNCRAPRKK

SEQ ID NO: 3076 - protein, 11 aa, HUMAN IMMUNODEFICIENCY VIRUS
LARNCRAPRKK

SEQ ID NO: 3077 - protein, 11 aa, HUMAN IMMUNODEFICIENCY VIRUS
CTERQANFLGK

SEQ ID NO: 3078 - protein, 11 aa, HUMAN IMMUNODEFICIENCY VIRUS
EITSLPKQEQK

SEQ ID NO: 3079 - protein, 8 aa, HUMAN IMMUNODEFICIENCY VIRUS
AVSQDLDK

SEQ ID NO: 3080 - protein, 8 aa, HUMAN IMMUNODEFICIENCY VIRUS
AVSRDLEK

SEQ ID NO: 3081 - protein, 8 aa, HUMAN IMMUNODEFICIENCY VIRUS
PLRPMTFK

SEQ ID NO: 3082 - protein, 8 aa, HUMAN IMMUNODEFICIENCY VIRUS
PLRPMTYK

SEQ ID NO: 3083 - protein, 8 aa, HUMAN IMMUNODEFICIENCY VIRUS
LSFFLKEK

SEQ ID NO: 3084 - protein, 8 aa, HUMAN IMMUNODEFICIENCY VIRUS
LSHFLKEK

SEQ ID NO: 3085 - protein, 8 aa, HUMAN IMMUNODEFICIENCY VIRUS
GLIYSKKR

SEQ ID NO: 3086 - protein, 8 aa, HUMAN IMMUNODEFICIENCY VIRUS
YTPGPGIR

SEQ ID NO: 3087 - protein, 8 aa, HUMAN IMMUNODEFICIENCY VIRUS
YTPGPGTR

SEQ ID NO: 3088 - protein, 8 aa, HUMAN IMMUNODEFICIENCY VIRUS
YTPGPGVR

SEQ ID NO: 3089 - protein, 8 aa, HUMAN IMMUNODEFICIENCY VIRUS
LTFGWCFK

SEQ ID NO: 3090 - protein, 8 aa, HUMAN IMMUNODEFICIENCY VIRUS
KLVPVDPR

SEQ ID NO: 3091 - protein, 8 aa, HUMAN IMMUNODEFICIENCY VIRUS
ELHPEFYK

SEQ ID NO: 3092 - protein, 8 aa, HUMAN IMMUNODEFICIENCY VIRUS
ELHPEYYK

SEQ ID NO: 3093 - protein, 9 aa, HUMAN IMMUNODEFICIENCY VIRUS
GAVSQDLDK

SEQ ID NO: 3094 - protein, 9 aa, HUMAN IMMUNODEFICIENCY VIRUS
GAVSRDLEK

SEQ ID NO: 3095 - protein, 9 aa, HUMAN IMMUNODEFICIENCY VIRUS
PVRPQVPLR

SEQ ID NO: 3096 - protein, 9 aa, HUMAN IMMUNODEFICIENCY VIRUS
AVDLSHFLK

SEQ ID NO: 3097 - protein, 9 aa, HUMAN IMMUNODEFICIENCY VIRUS
DLSFFLKEK

SEQ ID NO: 3098 - protein, 9 aa, HUMAN IMMUNODEFICIENCY VIRUS
DLSHFLKEK

SEQ ID NO: 3099 - protein, 9 aa, HUMAN IMMUNODEFICIENCY VIRUS
GLDGLIYSK

SEQ ID NO: 3100 - protein, 9 aa, HUMAN IMMUNODEFICIENCY VIRUS
GLEGLIYSK

SEQ ID NO: 3101 - protein, 9 aa, HUMAN IMMUNODEFICIENCY VIRUS
PLTFGWCFK

SEQ ID NO: 3102 - protein, 10 aa, HUMAN IMMUNODEFICIENCY VIRUS
AADGVGAVSR

SEQ ID NO: 3103 - protein, 10 aa, HUMAN IMMUNODEFICIENCY VIRUS
QVPLRPMTFK

SEQ ID NO: 3104 - protein, 10 aa, HUMAN IMMUNODEFICIENCY VIRUS
QVPLRPMTYK

SEQ ID NO: 3105 - protein, 10 aa, HUMAN IMMUNODEFICIENCY VIRUS
GAFDLSFFLK

SEQ ID NO: 3106 - protein, 10 aa, HUMAN IMMUNODEFICIENCY VIRUS
GLDGLIYSKK

SEQ ID NO: 3107 - protein, 11 aa, HUMAN IMMUNODEFICIENCY VIRUS
GVGAVSQDLDK

SEQ ID NO: 3108 - protein, 11 aa, HUMAN IMMUNODEFICIENCY VIRUS
GVGAVSRDLEK

SEQ ID NO: 3109 - protein, 11 aa, HUMAN IMMUNODEFICIENCY VIRUS
AVDLSHFLKEK

SEQ ID NO: 3110 - protein, 11 aa, HUMAN IMMUNODEFICIENCY VIRUS
GLDGLIYSKKR

SEQ ID NO: 3111 - protein, 11 aa, HUMAN IMMUNODEFICIENCY VIRUS
MARELHPEYYK

SEQ ID NO: 3112 - protein, 8 aa, HUMAN IMMUNODEFICIENCY VIRUS
RANSPTRR

SEQ ID NO: 3113 - protein, 8 aa, HUMAN IMMUNODEFICIENCY VIRUS
RANSPTSR

SEQ ID NO: 3114 - protein, 8 aa, HUMAN IMMUNODEFICIENCY VIRUS
STNSPTSR

SEQ ID NO: 3115 - protein, 8 aa, HUMAN IMMUNODEFICIENCY VIRUS
RANSPSSR

SEQ ID NO: 3116 - protein, 8 aa, HUMAN IMMUNODEFICIENCY VIRUS
RANSPTTR

SEQ ID NO: 3117 - protein, 8 aa, HUMAN IMMUNODEFICIENCY VIRUS
ILIEICGK

SEQ ID NO: 3118 - protein, 8 aa, HUMAN IMMUNODEFICIENCY VIRUS
LIEICGHK

SEQ ID NO: 3119 - protein, 8 aa, HUMAN IMMUNODEFICIENCY VIRUS
LIEICGKK

SEQ ID NO: 3120 - protein, 8 aa, HUMAN IMMUNODEFICIENCY VIRUS
PIETVPVK

SEQ ID NO: 3121 - protein, 8 aa, HUMAN IMMUNODEFICIENCY VIRUS
ETVPVKLK

SEQ ID NO: 3122 - protein, 8 aa, HUMAN IMMUNODEFICIENCY VIRUS
GMDGPKVK

SEQ ID NO: 3123 - protein, 8 aa, HUMAN IMMUNODEFICIENCY VIRUS
PLTEEKIK

SEQ ID NO: 3124 - protein, 8 aa, HUMAN IMMUNODEFICIENCY VIRUS
EICTEMEK

SEQ ID NO: 3125 - protein, 8 aa, HUMAN IMMUNODEFICIENCY VIRUS
NTPIFAIK

SEQ ID NO: 3126 - protein, 8 aa, HUMAN IMMUNODEFICIENCY VIRUS
NTPVFAIK

SEQ ID NO: 3127 - protein, 8 aa, HUMAN IMMUNODEFICIENCY VIRUS
PIFAIKKK

SEQ ID NO: 3128 - protein, 8 aa, HUMAN IMMUNODEFICIENCY VIRUS
PVFAIKKK

SEQ ID NO: 3129 - protein, 8 aa, HUMAN IMMUNODEFICIENCY VIRUS
PAGLKKKK

SEQ ID NO: 3130 - protein, 8 aa, HUMAN IMMUNODEFICIENCY VIRUS
PLDKDFRK

SEQ ID NO: 3131 - protein, 8 aa, HUMAN IMMUNODEFICIENCY VIRUS
NVLPQGWK

SEQ ID NO: 3132 - protein, 8 aa, HUMAN IMMUNODEFICIENCY VIRUS
KILEPFRK

SEQ ID NO: 3133 - protein, 8 aa, HUMAN IMMUNODEFICIENCY VIRUS
DLEIGQHR

SEQ ID NO: 3134 - protein, 8 aa, HUMAN IMMUNODEFICIENCY VIRUS
EIGQHRAK

SEQ ID NO: 3135 - protein, 8 aa, HUMAN IMMUNODEFICIENCY VIRUS
EIGQHRTK

SEQ ID NO: 3136 - protein, 8 aa, HUMAN IMMUNODEFICIENCY VIRUS
RAKIEELR

SEQ ID NO: 3137 - protein, 8 aa, HUMAN IMMUNODEFICIENCY VIRUS
RTKIEELR

SEQ ID NO: 3138 - protein, 8 aa, HUMAN IMMUNODEFICIENCY VIRUS
ELREHLLK

SEQ ID NO: 3139 - protein, 8 aa, HUMAN IMMUNODEFICIENCY VIRUS
ELRQHLLR

SEQ ID NO: 3140 - protein, 8 aa, HUMAN IMMUNODEFICIENCY VIRUS
WTVNDIQK

SEQ ID NO: 3141 - protein, 8 aa, HUMAN IMMUNODEFICIENCY VIRUS
DIQKLVGK

SEQ ID NO: 3142 - protein, 8 aa, HUMAN IMMUNODEFICIENCY VIRUS
ELELAENR

SEQ ID NO: 3143 - protein, 8 aa, HUMAN IMMUNODEFICIENCY VIRUS
GVYYDPSK

SEQ ID NO: 3144 - protein, 8 aa, HUMAN IMMUNODEFICIENCY VIRUS
DLIAEIQK

SEQ ID NO: 3145 - protein, 8 aa, HUMAN IMMUNODEFICIENCY VIRUS
QIYQEPFK

SEQ ID NO: 3146 - protein, 8 aa, HUMAN IMMUNODEFICIENCY VIRUS
GAHTNDVK

SEQ ID NO: 3147 - protein, 8 aa, HUMAN IMMUNODEFICIENCY VIRUS
SAHTNDVK

SEQ ID NO: 3148 - protein, 8 aa, HUMAN IMMUNODEFICIENCY VIRUS
TAHTNDVK

SEQ ID NO: 3149 - protein, 8 aa, HUMAN IMMUNODEFICIENCY VIRUS
QLTEAVQK

SEQ ID NO: 3150 - protein, 8 aa, HUMAN IMMUNODEFICIENCY VIRUS
QLTEVVQK

SEQ ID NO: 3151 - protein, 8 aa, HUMAN IMMUNODEFICIENCY VIRUS
ESIVIWGK

SEQ ID NO: 3152 - protein, 8 aa, HUMAN IMMUNODEFICIENCY VIRUS
VIWGKTPK

SEQ ID NO: 3153 - protein, 8 aa, HUMAN IMMUNODEFICIENCY VIRUS
KLWYQLEK

SEQ ID NO: 3154 - protein, 8 aa, HUMAN IMMUNODEFICIENCY VIRUS
YVDGAANR

SEQ ID NO: 3155 - protein, 8 aa, HUMAN IMMUNODEFICIENCY VIRUS
GAANRETK

SEQ ID NO: 3156 - protein, 8 aa, HUMAN IMMUNODEFICIENCY VIRUS
KAGYVTDR

SEQ ID NO: 3157 - protein, 8 aa, HUMAN IMMUNODEFICIENCY VIRUS
VTDRGRQK

SEQ ID NO: 3158 - protein, 8 aa, HUMAN IMMUNODEFICIENCY VIRUS
LTDTTNQK

SEQ ID NO: 3159 - protein, 8 aa, HUMAN IMMUNODEFICIENCY VIRUS
LTETTNQK

SEQ ID NO: 3160 - protein, 8 aa, HUMAN IMMUNODEFICIENCY VIRUS
IIQAQPDK

SEQ ID NO: 3161 - protein, 8 aa, HUMAN IMMUNODEFICIENCY VIRUS
IIQAQPDR

SEQ ID NO: 3162 - protein, 8 aa, HUMAN IMMUNODEFICIENCY VIRUS
QIIEQLIK

SEQ ID NO: 3163 - protein, 8 aa, HUMAN IMMUNODEFICIENCY VIRUS
IIEQLIKK

SEQ ID NO: 3164 - protein, 8 aa, HUMAN IMMUNODEFICIENCY VIRUS
LAWVPAHK

SEQ ID NO: 3165 - protein, 8 aa, HUMAN IMMUNODEFICIENCY VIRUS
LSWVPAHK

SEQ ID NO: 3166 - protein, 8 aa, HUMAN IMMUNODEFICIENCY VIRUS
KLVSAGIR

SEQ ID NO: 3167 - protein, 8 aa, HUMAN IMMUNODEFICIENCY VIRUS
KLVSSGIR

SEQ ID NO: 3168 - protein, 8 aa, HUMAN IMMUNODEFICIENCY VIRUS
LVSAGIRK

SEQ ID NO: 3169 - protein, 8 aa, HUMAN IMMUNODEFICIENCY VIRUS
LVSSGIRK

SEQ ID NO: 3170 - protein, 8 aa, HUMAN IMMUNODEFICIENCY VIRUS
KAQEEHEK

SEQ ID NO: 3171 - protein, 8 aa, HUMAN IMMUNODEFICIENCY VIRUS
KAQEEHER

SEQ ID NO: 3172 - protein, 8 aa, HUMAN IMMUNODEFICIENCY VIRUS
NLPPIVAK

SEQ ID NO: 3173 - protein, 8 aa, HUMAN IMMUNODEFICIENCY VIRUS
NLPPVVAK

SEQ ID NO: 3174 - protein, 8 aa, HUMAN IMMUNODEFICIENCY VIRUS
EIVASCDK

SEQ ID NO: 3175 - protein, 8 aa, HUMAN IMMUNODEFICIENCY VIRUS
ETAYFILK

SEQ ID NO: 3176 - protein, 8 aa, HUMAN IMMUNODEFICIENCY VIRUS
ETAYFLLK

SEQ ID NO: 3177 - protein, 8 aa, HUMAN IMMUNODEFICIENCY VIRUS
FILKLAGR

SEQ ID NO: 3178 - protein, 8 aa, HUMAN IMMUNODEFICIENCY VIRUS
FLLKLAGR

SEQ ID NO: 3179 - protein, 8 aa, HUMAN IMMUNODEFICIENCY VIRUS
LAGRWPVK

SEQ ID NO: 3180 - protein, 8 aa, HUMAN IMMUNODEFICIENCY VIRUS
GVVESMNK

SEQ ID NO: 3181 - protein, 8 aa, HUMAN IMMUNODEFICIENCY VIRUS
ESMNKELK

SEQ ID NO: 3182 - protein, 8 aa, HUMAN IMMUNODEFICIENCY VIRUS
SMNKELKK

SEQ ID NO: 3183 - protein, 8 aa, HUMAN IMMUNODEFICIENCY VIRUS
AVFIHNFK

SEQ ID NO: 3184 - protein, 8 aa, HUMAN IMMUNODEFICIENCY VIRUS
FIHNFKRK

SEQ ID NO: 3185 - protein, 8 aa, HUMAN IMMUNODEFICIENCY VIRUS
IASDIQTK

SEQ ID NO: 3186 - protein, 8 aa, HUMAN IMMUNODEFICIENCY VIRUS
IATDIQTK

SEQ ID NO: 3187 - protein, 8 aa, HUMAN IMMUNODEFICIENCY VIRUS
ELQKQIIK

SEQ ID NO: 3188 - protein, 8 aa, HUMAN IMMUNODEFICIENCY VIRUS
ELQKQITK

SEQ ID NO: 3189 - protein, 8 aa, HUMAN IMMUNODEFICIENCY VIRUS
IIKIQNFR

SEQ ID NO: 3190 - protein, 8 aa, HUMAN IMMUNODEFICIENCY VIRUS
ITKIQNFR

SEQ ID NO: 3191 - protein, 8 aa, HUMAN IMMUNODEFICIENCY VIRUS
RVYYRDSR

SEQ ID NO: 3192 - protein, 8 aa, HUMAN IMMUNODEFICIENCY VIRUS
DSRDPIWK

SEQ ID NO: 3193 - protein, 8 aa, HUMAN IMMUNODEFICIENCY VIRUS
DSRDPLWK

SEQ ID NO: 3194 - protein, 8 aa, HUMAN IMMUNODEFICIENCY VIRUS
PIWKGPAK

SEQ ID NO: 3195 - protein, 8 aa, HUMAN IMMUNODEFICIENCY VIRUS
PLWKGPAK

SEQ ID NO: 3196 - protein, 8 aa, HUMAN IMMUNODEFICIENCY VIRUS
DIKVVPRR

SEQ ID NO: 3197 - protein, 8 aa, HUMAN IMMUNODEFICIENCY VIRUS
EIKVVPRR

SEQ ID NO: 3198 - protein, 8 aa, HUMAN IMMUNODEFICIENCY VIRUS
VVPRRKAK

SEQ ID NO: 3199 - protein, 8 aa, HUMAN IMMUNODEFICIENCY VIRUS
VVPRRKVK

SEQ ID NO: 3200 - protein, 8 aa, HUMAN IMMUNODEFICIENCY VIRUS
KIIKDYGK

SEQ ID NO: 3201 - protein, 8 aa, HUMAN IMMUNODEFICIENCY VIRUS
KIIRDYGK

SEQ ID NO: 3202 - protein, 9 aa, HUMAN IMMUNODEFICIENCY VIRUS
LAFPQGEAR

SEQ ID NO: 3203 - protein, 9 aa, HUMAN IMMUNODEFICIENCY VIRUS
LAFQQGEAR

SEQ ID NO: 3204 - protein, 9 aa, HUMAN IMMUNODEFICIENCY VIRUS
QTRANSPTR

SEQ ID NO: 3205 - protein, 9 aa, HUMAN IMMUNODEFICIENCY VIRUS
NSTNSPTSR

SEQ ID NO: 3206 - protein, 9 aa, HUMAN IMMUNODEFICIENCY VIRUS
PTSRELQVR

SEQ ID NO: 3207 - protein, 9 aa, HUMAN IMMUNODEFICIENCY VIRUS
PSSRELQVR

SEQ ID NO: 3208 - protein, 9 aa, HUMAN IMMUNODEFICIENCY VIRUS
TIKIGGQLK

SEQ ID NO: 3209 - protein, 9 aa, HUMAN IMMUNODEFICIENCY VIRUS
DINLPGKWK

SEQ ID NO: 3210 - protein, 9 aa, HUMAN IMMUNODEFICIENCY VIRUS
EINLPGKWK

SEQ ID NO: 3211 - protein, 9 aa, HUMAN IMMUNODEFICIENCY VIRUS
NLPGKWKPK

SEQ ID NO: 3212 - protein, 9 aa, HUMAN IMMUNODEFICIENCY VIRUS
GIGGFIKVK

SEQ ID NO: 3213 - protein, 9 aa, HUMAN IMMUNODEFICIENCY VIRUS
GIGGFIKVR

SEQ ID NO: 3214 - protein, 9 aa, HUMAN IMMUNODEFICIENCY VIRUS
QILIEICGK

SEQ ID NO: 3215 - protein, 9 aa, HUMAN IMMUNODEFICIENCY VIRUS
ILIEICGKK

SEQ ID NO: 3216 - protein, 9 aa, HUMAN IMMUNODEFICIENCY VIRUS
PTPVNIIGR

SEQ ID NO: 3217 - protein, 9 aa, HUMAN IMMUNODEFICIENCY VIRUS
CTEMEKEGK

SEQ ID NO: 3218 - protein, 9 aa, HUMAN IMMUNODEFICIENCY VIRUS
NTPIFAIKK

SEQ ID NO: 3219 - protein, 9 aa, HUMAN IMMUNODEFICIENCY VIRUS
NTPVFAIKK

SEQ ID NO: 3220 - protein, 9 aa, HUMAN IMMUNODEFICIENCY VIRUS
AIKKKDSTK

SEQ ID NO: 3221 - protein, 9 aa, HUMAN IMMUNODEFICIENCY VIRUS
LVDFRELNK

SEQ ID NO: 3222 - protein, 9 aa, HUMAN IMMUNODEFICIENCY VIRUS
GIPHPAGLK

SEQ ID NO: 3223 - protein, 9 aa, HUMAN IMMUNODEFICIENCY VIRUS
SVPLDKDFR

SEQ ID NO: 3224 - protein, 9 aa, HUMAN IMMUNODEFICIENCY VIRUS
AIFQSSMTK

SEQ ID NO: 3225 - protein, 9 aa, HUMAN IMMUNODEFICIENCY VIRUS
MTKILEPFR

SEQ ID NO: 3226 - protein, 9 aa, HUMAN IMMUNODEFICIENCY VIRUS
TTPDKKHQK

SEQ ID NO: 3227 - protein, 9 aa, HUMAN IMMUNODEFICIENCY VIRUS
ASQIYAGIK

SEQ ID NO: 3228 - protein, 9 aa, HUMAN IMMUNODEFICIENCY VIRUS
ASQIYPGIK

SEQ ID NO: 3229 - protein, 9 aa, HUMAN IMMUNODEFICIENCY VIRUS
QIYAGIKVK

SEQ ID NO: 3230 - protein, 9 aa, HUMAN IMMUNODEFICIENCY VIRUS
QIYPGIKVK

SEQ ID NO: 3231 - protein, 9 aa, HUMAN IMMUNODEFICIENCY VIRUS
QIYPGIKVR

SEQ ID NO: 3232 - protein, 9 aa, HUMAN IMMUNODEFICIENCY VIRUS
GIKVKQLCK

SEQ ID NO: 3233 - protein, 9 aa, HUMAN IMMUNODEFICIENCY VIRUS
GIKVRQLCK

SEQ ID NO: 3234 - protein, 9 aa, HUMAN IMMUNODEFICIENCY VIRUS
LAENREILK

SEQ ID NO: 3235 - protein, 9 aa, HUMAN IMMUNODEFICIENCY VIRUS
NLKTGKYAK

SEQ ID NO: 3236 - protein, 9 aa, HUMAN IMMUNODEFICIENCY VIRUS
NLKTGKYAR

SEQ ID NO: 3237 - protein, 9 aa, HUMAN IMMUNODEFICIENCY VIRUS
KTGKYAKMR

SEQ ID NO: 3238 - protein, 9 aa, HUMAN IMMUNODEFICIENCY VIRUS
KTGKYARMR

SEQ ID NO: 3239 - protein, 9 aa, HUMAN IMMUNODEFICIENCY VIRUS
RSAHTNDVK

SEQ ID NO: 3240 - protein, 9 aa, HUMAN IMMUNODEFICIENCY VIRUS
IVIWGKTPK

SEQ ID NO: 3241 - protein, 9 aa, HUMAN IMMUNODEFICIENCY VIRUS
FVNTPPLVK

SEQ ID NO: 3242 - protein, 9 aa, HUMAN IMMUNODEFICIENCY VIRUS
YVTDRGRQK

SEQ ID NO: 3243 - protein, 9 aa, HUMAN IMMUNODEFICIENCY VIRUS
SLTDTTNQK

SEQ ID NO: 3244 - protein, 9 aa, HUMAN IMMUNODEFICIENCY VIRUS
SLTETTNQK

SEQ ID NO: 3245 - protein, 9 aa, HUMAN IMMUNODEFICIENCY VIRUS
GIIQAQPDK

SEQ ID NO: 3246 - protein, 9 aa, HUMAN IMMUNODEFICIENCY VIRUS
GIIQAQPDR

SEQ ID NO: 3247 - protein, 9 aa, HUMAN IMMUNODEFICIENCY VIRUS
QIIEQLIKK

SEQ ID NO: 3248 - protein, 9 aa, HUMAN IMMUNODEFICIENCY VIRUS
YLAWVPAHK

SEQ ID NO: 3249 - protein, 9 aa, HUMAN IMMUNODEFICIENCY VIRUS
YLSWVPAHK

SEQ ID NO: 3250 - protein, 9 aa, HUMAN IMMUNODEFICIENCY VIRUS
KLVSAGIRK

SEQ ID NO: 3251 - protein, 9 aa, HUMAN IMMUNODEFICIENCY VIRUS
KLVSSGIRK

SEQ ID NO: 3252 - protein, 9 aa, HUMAN IMMUNODEFICIENCY VIRUS
VLFLDGIDK

SEQ ID NO: 3253 - protein, 9 aa, HUMAN IMMUNODEFICIENCY VIRUS
ASCDKCQLK

SEQ ID NO: 3254 - protein, 9 aa, HUMAN IMMUNODEFICIENCY VIRUS
KLAGRWPVK

SEQ ID NO: 3255 - protein, 9 aa, HUMAN IMMUNODEFICIENCY VIRUS
AACWWAGIK

SEQ ID NO: 3256 - protein, 9 aa, HUMAN IMMUNODEFICIENCY VIRUS
ESMNKELKK

SEQ ID NO: 3257 - protein, 9 aa, HUMAN IMMUNODEFICIENCY VIRUS
MAVFIHNFK

SEQ ID NO: 3258 - protein, 9 aa, HUMAN IMMUNODEFICIENCY VIRUS
AVFIHNFKR

SEQ ID NO: 3259 - protein, 9 aa, HUMAN IMMUNODEFICIENCY VIRUS
IIASDIQTK

SEQ ID NO: 3260 - protein, 9 aa, HUMAN IMMUNODEFICIENCY VIRUS
IIATDIQTK

SEQ ID NO: 3261 - protein, 9 aa, HUMAN IMMUNODEFICIENCY VIRUS
DIQTKELQK

SEQ ID NO: 3262 - protein, 9 aa, HUMAN IMMUNODEFICIENCY VIRUS
QIIKIQNFR

SEQ ID NO: 3263 - protein, 9 aa, HUMAN IMMUNODEFICIENCY VIRUS
QITKIQNFR

SEQ ID NO: 3264 - protein, 9 aa, HUMAN IMMUNODEFICIENCY VIRUS
VIQDNSDIK

SEQ ID NO: 3265 - protein, 9 aa, HUMAN IMMUNODEFICIENCY VIRUS
VIQDNSEIK

SEQ ID NO: 3266 - protein, 9 aa, HUMAN IMMUNODEFICIENCY VIRUS
NSDIKVVPR

SEQ ID NO: 3267 - protein, 9 aa, HUMAN IMMUNODEFICIENCY VIRUS
NSEIKVVPR

SEQ ID NO: 3268 - protein, 9 aa, HUMAN IMMUNODEFICIENCY VIRUS
DIKVVPRRK

SEQ ID NO: 3269 - protein, 9 aa, HUMAN IMMUNODEFICIENCY VIRUS
EIKVVPRRK

SEQ ID NO: 3270 - protein, 9 aa, HUMAN IMMUNODEFICIENCY VIRUS
KVVPRRKAK

SEQ ID NO: 3271 - protein, 9 aa, HUMAN IMMUNODEFICIENCY VIRUS
KVVPRRKVK

SEQ ID NO: 3272 - protein, 10 aa, HUMAN IMMUNODEFICIENCY VIRUS
NLAFPQGEAR

SEQ ID NO: 3273 - protein, 10 aa, HUMAN IMMUNODEFICIENCY VIRUS
NLAFQQGEAR

SEQ ID NO: 3274 - protein, 10 aa, HUMAN IMMUNODEFICIENCY VIRUS
QTRANSPTRR

SEQ ID NO: 3275 - protein, 10 aa, HUMAN IMMUNODEFICIENCY VIRUS
QTRANSPTSR

SEQ ID NO: 3276 - protein, 10 aa, HUMAN IMMUNODEFICIENCY VIRUS
PSRANSPTSR

SEQ ID NO: 3277 - protein, 10 aa, HUMAN IMMUNODEFICIENCY VIRUS
QTRANSPSSR

SEQ ID NO: 3278 - protein, 10 aa, HUMAN IMMUNODEFICIENCY VIRUS
QTRANSPTTR

SEQ ID NO: 3279 - protein, 10 aa, HUMAN IMMUNODEFICIENCY VIRUS
VTIKIGGQLK

SEQ ID NO: 3280 - protein, 10 aa, HUMAN IMMUNODEFICIENCY VIRUS
VLEDINLPGK

SEQ ID NO: 3281 - protein, 10 aa, HUMAN IMMUNODEFICIENCY VIRUS
VLEEINLPGK

SEQ ID NO: 3282 - protein, 10 aa, HUMAN IMMUNODEFICIENCY VIRUS
MIGGIGGFIK

SEQ ID NO: 3283 - protein, 10 aa, HUMAN IMMUNODEFICIENCY VIRUS
QILIEICGKK

SEQ ID NO: 3284 - protein, 10 aa, HUMAN IMMUNODEFICIENCY VIRUS
ISPIETVPVK

SEQ ID NO: 3285 - protein, 10 aa, HUMAN IMMUNODEFICIENCY VIRUS
PIETVPVKLK

SEQ ID NO: 3286 - protein, 10 aa, HUMAN IMMUNODEFICIENCY VIRUS
KLKPGMDGPK

SEQ ID NO: 3287 - protein, 10 aa, HUMAN IMMUNODEFICIENCY VIRUS
LVEICTEMEK

SEQ ID NO: 3288 - protein, 10 aa, HUMAN IMMUNODEFICIENCY VIRUS
EMEKEGKISK

SEQ ID NO: 3289 - protein, 10 aa, HUMAN IMMUNODEFICIENCY VIRUS
NTPIFAIKKK

SEQ ID NO: 3290 - protein, 10 aa, HUMAN IMMUNODEFICIENCY VIRUS
NTPVFAIKKK

SEQ ID NO: 3291 - protein, 10 aa, HUMAN IMMUNODEFICIENCY VIRUS
FAIKKKDSTK

SEQ ID NO: 3292 - protein, 10 aa, HUMAN IMMUNODEFICIENCY VIRUS
KLVDFRELNK

SEQ ID NO: 3293 - protein, 10 aa, HUMAN IMMUNODEFICIENCY VIRUS
LVDFRELNKR

SEQ ID NO: 3294 - protein, 10 aa, HUMAN IMMUNODEFICIENCY VIRUS
GIPHPAGLKK

SEQ ID NO: 3295 - protein, 10 aa, HUMAN IMMUNODEFICIENCY VIRUS
DAYFSVPLDK

SEQ ID NO: 3296 - protein, 10 aa, HUMAN IMMUNODEFICIENCY VIRUS
FSVPLDKDFR

SEQ ID NO: 3297 - protein, 10 aa, HUMAN IMMUNODEFICIENCY VIRUS
SVPLDKDFRK

SEQ ID NO: 3298 - protein, 10 aa, HUMAN IMMUNODEFICIENCY VIRUS
SINNETPGIR

SEQ ID NO: 3299 - protein, 10 aa, HUMAN IMMUNODEFICIENCY VIRUS
STNNETPGIR

SEQ ID NO: 3300 - protein, 10 aa, HUMAN IMMUNODEFICIENCY VIRUS
PAIFQSSMTK

SEQ ID NO: 3301 - protein, 10 aa, HUMAN IMMUNODEFICIENCY VIRUS
SMTKILEPFR

SEQ ID NO: 3302 - protein, 10 aa, HUMAN IMMUNODEFICIENCY VIRUS
MTKILEPFRK

SEQ ID NO: 3303 - protein, 10 aa, HUMAN IMMUNODEFICIENCY VIRUS
GSDLEIGQHR

SEQ ID NO: 3304 - protein, 10 aa, HUMAN IMMUNODEFICIENCY VIRUS
DLEIGQHRAK

SEQ ID NO: 3305 - protein, 10 aa, HUMAN IMMUNODEFICIENCY VIRUS
DLEIGQHRTK

SEQ ID NO: 3306 - protein, 10 aa, HUMAN IMMUNODEFICIENCY VIRUS
FTTPDKKHQK

SEQ ID NO: 3307 - protein, 10 aa, HUMAN IMMUNODEFICIENCY VIRUS
WMGYELHPDK

SEQ ID NO: 3308 - protein, 10 aa, HUMAN IMMUNODEFICIENCY VIRUS
TVQPIQLPEK

SEQ ID NO: 3309 - protein, 10 aa, HUMAN IMMUNODEFICIENCY VIRUS
TVQPIVLPEK

SEQ ID NO: 3310 - protein, 10 aa, HUMAN IMMUNODEFICIENCY VIRUS
DSWTVNDIQK

SEQ ID NO: 3311 - protein, 10 aa, HUMAN IMMUNODEFICIENCY VIRUS
ESWTVNDIQK

SEQ ID NO: 3312 - protein, 10 aa, HUMAN IMMUNODEFICIENCY VIRUS
WASQIYAGIK

SEQ ID NO: 3313 - protein, 10 aa, HUMAN IMMUNODEFICIENCY VIRUS
WASQIYPGIK

SEQ ID NO: 3314 - protein, 10 aa, HUMAN IMMUNODEFICIENCY VIRUS
KVKQLCKLLR

SEQ ID NO: 3315 - protein, 10 aa, HUMAN IMMUNODEFICIENCY VIRUS
KVRQLCKLLR

SEQ ID NO: 3316 - protein, 10 aa, HUMAN IMMUNODEFICIENCY VIRUS
QLCKLLRGAK

SEQ ID NO: 3317 - protein, 10 aa, HUMAN IMMUNODEFICIENCY VIRUS
QLCKLLRGTK

SEQ ID NO: 3318 - protein, 10 aa, HUMAN IMMUNODEFICIENCY VIRUS
EAELELAENR

SEQ ID NO: 3319 - protein, 10 aa, HUMAN IMMUNODEFICIENCY VIRUS
ELAENREILK

SEQ ID NO: 3320 - protein, 10 aa, HUMAN IMMUNODEFICIENCY VIRUS
ATESIVIWGK

SEQ ID NO: 3321 - protein, 10 aa, HUMAN IMMUNODEFICIENCY VIRUS
SIVIWGKTPK

SEQ ID NO: 3322 - protein, 10 aa, HUMAN IMMUNODEFICIENCY VIRUS
VIWGKTPKFK

SEQ ID NO: 3323 - protein, 10 aa, HUMAN IMMUNODEFICIENCY VIRUS
VIWGKTPKFR

SEQ ID NO: 3324 - protein, 10 aa, HUMAN IMMUNODEFICIENCY VIRUS
LVKLWYQLEK

SEQ ID NO: 3325 - protein, 10 aa, HUMAN IMMUNODEFICIENCY VIRUS
AANRETKLGK

SEQ ID NO: 3326 - protein, 10 aa, HUMAN IMMUNODEFICIENCY VIRUS
KAGYVTDRGR

SEQ ID NO: 3327 - protein, 10 aa, HUMAN IMMUNODEFICIENCY VIRUS
VSLTDTTNQK

SEQ ID NO: 3328 - protein, 10 aa, HUMAN IMMUNODEFICIENCY VIRUS
VSLTETTNQK

SEQ ID NO: 3329 - protein, 10 aa, HUMAN IMMUNODEFICIENCY VIRUS
VSQIIEQLIK

SEQ ID NO: 3330 - protein, 10 aa, HUMAN IMMUNODEFICIENCY VIRUS
IIEQLIKKEK

SEQ ID NO: 3331 - protein, 10 aa, HUMAN IMMUNODEFICIENCY VIRUS
GIGGNEQVDK

SEQ ID NO: 3332 - protein, 10 aa, HUMAN IMMUNODEFICIENCY VIRUS
KVLFLDGIDK

SEQ ID NO: 3333 - protein, 10 aa, HUMAN IMMUNODEFICIENCY VIRUS
VASCDKCQLK

SEQ ID NO: 3334 - protein, 10 aa, HUMAN IMMUNODEFICIENCY VIRUS
QLDCTHLEGK

SEQ ID NO: 3335 - protein, 10 aa, HUMAN IMMUNODEFICIENCY VIRUS
GSNFTSAAVK

SEQ ID NO: 3336 - protein, 10 aa, HUMAN IMMUNODEFICIENCY VIRUS
GSNFTSTTVK

SEQ ID NO: 3337 - protein, 10 aa, HUMAN IMMUNODEFICIENCY VIRUS
KAACWWAGIK

SEQ ID NO: 3338 - protein, 10 aa, HUMAN IMMUNODEFICIENCY VIRUS
VVESMNKELK

SEQ ID NO: 3339 - protein, 10 aa, HUMAN IMMUNODEFICIENCY VIRUS
ELKKIIGQVR

SEQ ID NO: 3340 - protein, 10 aa, HUMAN IMMUNODEFICIENCY VIRUS
QVRDQAEHLK

SEQ ID NO: 3341 - protein, 10 aa, HUMAN IMMUNODEFICIENCY VIRUS
QVREQAEHLK

SEQ ID NO: 3342 - protein, 10 aa, HUMAN IMMUNODEFICIENCY VIRUS
QMAVFIHNFK

SEQ ID NO: 3343 - protein, 10 aa, HUMAN IMMUNODEFICIENCY VIRUS
MAVFIHNFKR

SEQ ID NO: 3344 - protein, 10 aa, HUMAN IMMUNODEFICIENCY VIRUS
AVFIHNFKRK

SEQ ID NO: 3345 - protein, 10 aa, HUMAN IMMUNODEFICIENCY VIRUS
GIGGYSAGER

SEQ ID NO: 3346 - protein, 10 aa, HUMAN IMMUNODEFICIENCY VIRUS
DIIASDIQTK

SEQ ID NO: 3347 - protein, 10 aa, HUMAN IMMUNODEFICIENCY VIRUS
DIIATDIQTK

SEQ ID NO: 3348 - protein, 10 aa, HUMAN IMMUNODEFICIENCY VIRUS
KIQNFRVYYR

SEQ ID NO: 3349 - protein, 10 aa, HUMAN IMMUNODEFICIENCY VIRUS
VVIQDNSDIK

SEQ ID NO: 3350 - protein, 10 aa, HUMAN IMMUNODEFICIENCY VIRUS
VVIQDNSEIK

SEQ ID NO: 3351 - protein, 10 aa, HUMAN IMMUNODEFICIENCY VIRUS
NSDIKVVPRR

SEQ ID NO: 3352 - protein, 10 aa, HUMAN IMMUNODEFICIENCY VIRUS
NSEIKVVPRR

SEQ ID NO: 3353 - protein, 10 aa, HUMAN IMMUNODEFICIENCY VIRUS
KAKIIRDYGK

SEQ ID NO: 3354 - protein, 10 aa, HUMAN IMMUNODEFICIENCY VIRUS
MAGDDCVAGR

SEQ ID NO: 3355 - protein, 10 aa, HUMAN IMMUNODEFICIENCY VIRUS
MAGDDCVASR

SEQ ID NO: 3356 - protein, 11 aa, HUMAN IMMUNODEFICIENCY VIRUS
NSPTSRELQVR

SEQ ID NO: 3357 - protein, 11 aa, HUMAN IMMUNODEFICIENCY VIRUS
NSPSSRELQVR

SEQ ID NO: 3358 - protein, 11 aa, HUMAN IMMUNODEFICIENCY VIRUS
NSPTTRELQVR

SEQ ID NO: 3359 - protein, 11 aa, HUMAN IMMUNODEFICIENCY VIRUS
FSFPQITLWQR

SEQ ID NO: 3360 - protein, 11 aa, HUMAN IMMUNODEFICIENCY VIRUS
TLWQRPLVTIK

SEQ ID NO: 3361 - protein, 11 aa, HUMAN IMMUNODEFICIENCY VIRUS
TLWQRPLVTVK

SEQ ID NO: 3362 - protein, 11 aa, HUMAN IMMUNODEFICIENCY VIRUS
LVTIKIGGQLK

SEQ ID NO: 3363 - protein, 11 aa, HUMAN IMMUNODEFICIENCY VIRUS
TVLEDINLPGK

SEQ ID NO: 3364 - protein, 11 aa, HUMAN IMMUNODEFICIENCY VIRUS
TVLEEINLPGK

SEQ ID NO: 3365 - protein, 11 aa, HUMAN IMMUNODEFICIENCY VIRUS
DINLPGKWKPK

SEQ ID NO: 3366 - protein, 11 aa, HUMAN IMMUNODEFICIENCY VIRUS
EINLPGKWKPK

SEQ ID NO: 3367 - protein, 11 aa, HUMAN IMMUNODEFICIENCY VIRUS
KMIGGIGGFIK

SEQ ID NO: 3368 - protein, 11 aa, HUMAN IMMUNODEFICIENCY VIRUS
PISPIETVPVK

SEQ ID NO: 3369 - protein, 11 aa, HUMAN IMMUNODEFICIENCY VIRUS
KVKQWPLTEEK

SEQ ID NO: 3370 - protein, 11 aa, HUMAN IMMUNODEFICIENCY VIRUS
ALVEICTEMEK

SEQ ID NO: 3371 - protein, 11 aa, HUMAN IMMUNODEFICIENCY VIRUS
EICTEMEKEGK

SEQ ID NO: 3372 - protein, 11 aa, HUMAN IMMUNODEFICIENCY VIRUS
AIKKKDSTKWR

SEQ ID NO: 3373 - protein, 11 aa, HUMAN IMMUNODEFICIENCY VIRUS
STKWRKLVDFR

SEQ ID NO: 3374 - protein, 11 aa, HUMAN IMMUNODEFICIENCY VIRUS
KLVDFRELNKR

SEQ ID NO: 3375 - protein, 11 aa, HUMAN IMMUNODEFICIENCY VIRUS
QLGIPHPAGLK

SEQ ID NO: 3376 - protein, 11 aa, HUMAN IMMUNODEFICIENCY VIRUS
GIPHPAGLKKK

SEQ ID NO: 3377 - protein, 11 aa, HUMAN IMMUNODEFICIENCY VIRUS
FSVPLDKDFRK

SEQ ID NO: 3378 - protein, 11 aa, HUMAN IMMUNODEFICIENCY VIRUS
PSINNETPGIR

SEQ ID NO: 3379 - protein, 11 aa, HUMAN IMMUNODEFICIENCY VIRUS
PSTNNETPGIR

SEQ ID NO: 3380 - protein, 11 aa, HUMAN IMMUNODEFICIENCY VIRUS
SSMTKILEPFR

SEQ ID NO: 3381 - protein, 11 aa, HUMAN IMMUNODEFICIENCY VIRUS
SMTKILEPFRK

SEQ ID NO: 3382 - protein, 11 aa, HUMAN IMMUNODEFICIENCY VIRUS
KIEELREHLLK

SEQ ID NO: 3383 - protein, 11 aa, HUMAN IMMUNODEFICIENCY VIRUS
KIEELRQHLLR

SEQ ID NO: 3384 - protein, 11 aa, HUMAN IMMUNODEFICIENCY VIRUS
LLKWGFTTPDK

SEQ ID NO: 3385 - protein, 11 aa, HUMAN IMMUNODEFICIENCY VIRUS
LLRWGFTTPDK

SEQ ID NO: 3386 - protein, 11 aa, HUMAN IMMUNODEFICIENCY VIRUS
WTVQPIQLPEK

SEQ ID NO: 3387 - protein, 11 aa, HUMAN IMMUNODEFICIENCY VIRUS
WTVQPIVLPEK

SEQ ID NO: 3388 - protein, 11 aa, HUMAN IMMUNODEFICIENCY VIRUS
TVNDIQKLVGK

SEQ ID NO: 3389 - protein, 11 aa, HUMAN IMMUNODEFICIENCY VIRUS
ASQIYAGIKVK

SEQ ID NO: 3390 - protein, 11 aa, HUMAN IMMUNODEFICIENCY VIRUS
ASQIYPGIKVK

SEQ ID NO: 3391 - protein, 11 aa, HUMAN IMMUNODEFICIENCY VIRUS
ASQIYPGIKVR

SEQ ID NO: 3392 - protein, 11 aa, HUMAN IMMUNODEFICIENCY VIRUS
YAGIKVKQLCK

SEQ ID NO: 3393 - protein, 11 aa, HUMAN IMMUNODEFICIENCY VIRUS
PVHGVYYDPSK

SEQ ID NO: 3394 - protein, 11 aa, HUMAN IMMUNODEFICIENCY VIRUS
PSKDLIAEIQK

SEQ ID NO: 3395 - protein, 11 aa, HUMAN IMMUNODEFICIENCY VIRUS
WTYQIYQEPFK

SEQ ID NO: 3396 - protein, 11 aa, HUMAN IMMUNODEFICIENCY VIRUS
QIYQEPFKNLK

SEQ ID NO: 3397 - protein, 11 aa, HUMAN IMMUNODEFICIENCY VIRUS
NLKTGKYAKMR

SEQ ID NO: 3398 - protein, 11 aa, HUMAN IMMUNODEFICIENCY VIRUS
NLKTGKYARMR

SEQ ID NO: 3399 - protein, 11 aa, HUMAN IMMUNODEFICIENCY VIRUS
RMRGAHTNDVK

SEQ ID NO: 3400 - protein, 11 aa, HUMAN IMMUNODEFICIENCY VIRUS
DVKQLTEAVQK

SEQ ID NO: 3401 - protein, 11 aa, HUMAN IMMUNODEFICIENCY VIRUS
IATESIVIWGK

SEQ ID NO: 3402 - protein, 11 aa, HUMAN IMMUNODEFICIENCY VIRUS
ESIVIWGKTPK

SEQ ID NO: 3403 - protein, 11 aa, HUMAN IMMUNODEFICIENCY VIRUS
IVIWGKTPKFK

SEQ ID NO: 3404 - protein, 11 aa, HUMAN IMMUNODEFICIENCY VIRUS
IVIWGKTPKFR

SEQ ID NO: 3405 - protein, 11 aa, HUMAN IMMUNODEFICIENCY VIRUS
KTPKFKLPIQK

SEQ ID NO: 3406 - protein, 11 aa, HUMAN IMMUNODEFICIENCY VIRUS
KTPKFRLPIQK

SEQ ID NO: 3407 - protein, 11 aa, HUMAN IMMUNODEFICIENCY VIRUS
PLVKLWYQLEK

SEQ ID NO: 3408 - protein, 11 aa, HUMAN IMMUNODEFICIENCY VIRUS
ETFYVDGAANR

SEQ ID NO: 3409 - protein, 11 aa, HUMAN IMMUNODEFICIENCY VIRUS
YVDGAANRETK

SEQ ID NO: 3410 - protein, 11 aa, HUMAN IMMUNODEFICIENCY VIRUS
GAANRETKLGK

SEQ ID NO: 3411 - protein, 11 aa, HUMAN IMMUNODEFICIENCY VIRUS
KLGKAGYVTDR

SEQ ID NO: 3412 - protein, 11 aa, HUMAN IMMUNODEFICIENCY VIRUS
VVSLTDTTNQK

SEQ ID NO: 3413 - protein, 11 aa, HUMAN IMMUNODEFICIENCY VIRUS
VVSLTETTNQK

SEQ ID NO: 3414 - protein, 11 aa, HUMAN IMMUNODEFICIENCY VIRUS
ALGIIQAQPDK

SEQ ID NO: 3415 - protein, 11 aa, HUMAN IMMUNODEFICIENCY VIRUS
ALGIIQAQPDR

SEQ ID NO: 3416 - protein, 11 aa, HUMAN IMMUNODEFICIENCY VIRUS
LVNQIIEQLIK

SEQ ID NO: 3417 - protein, 11 aa, HUMAN IMMUNODEFICIENCY VIRUS
LVSQIIEQLIK

SEQ ID NO: 3418 - protein, 11 aa, HUMAN IMMUNODEFICIENCY VIRUS
VSQIIEQLIKK

SEQ ID NO: 3419 - protein, 11 aa, HUMAN IMMUNODEFICIENCY VIRUS
QIIEQLIKKEK

SEQ ID NO: 3420 - protein, 11 aa, HUMAN IMMUNODEFICIENCY VIRUS
KVYLAWVPAHK

SEQ ID NO: 3421 - protein, 11 aa, HUMAN IMMUNODEFICIENCY VIRUS
KVYLSWVPAHK

SEQ ID NO: 3422 - protein, 11 aa, HUMAN IMMUNODEFICIENCY VIRUS
QVDKLVSAGIR

SEQ ID NO: 3423 - protein, 11 aa, HUMAN IMMUNODEFICIENCY VIRUS
QVDKLVSSGIR

SEQ ID NO: 3424 - protein, 11 aa, HUMAN IMMUNODEFICIENCY VIRUS
GIDKAQEEHEK

SEQ ID NO: 3425 - protein, 11 aa, HUMAN IMMUNODEFICIENCY VIRUS
GIDKAQEEHER

SEQ ID NO: 3426 - protein, 11 aa, HUMAN IMMUNODEFICIENCY VIRUS
VAKEIVASCDK

SEQ ID NO: 3427 - protein, 11 aa, HUMAN IMMUNODEFICIENCY VIRUS
IVASCDKCQLK

SEQ ID NO: 3428 - protein, 11 aa, HUMAN IMMUNODEFICIENCY VIRUS
TAYFILKLAGR

SEQ ID NO: 3429 - protein, 11 aa, HUMAN IMMUNODEFICIENCY VIRUS
TAYFLLKLAGR

SEQ ID NO: 3430 - protein, 11 aa, HUMAN IMMUNODEFICIENCY VIRUS
ILKLAGRWPVK

SEQ ID NO: 3431 - protein, 11 aa, HUMAN IMMUNODEFICIENCY VIRUS
LLKLAGRWPVK

SEQ ID NO: 3432 - protein, 11 aa, HUMAN IMMUNODEFICIENCY VIRUS
QSQGVVESMNK

SEQ ID NO: 3433 - protein, 11 aa, HUMAN IMMUNODEFICIENCY VIRUS
GVVESMNKELK

SEQ ID NO: 3434 - protein, 11 aa, HUMAN IMMUNODEFICIENCY VIRUS
VVESMNKELKK

SEQ ID NO: 3435 - protein, 11 aa, HUMAN IMMUNODEFICIENCY VIRUS
QMAVFIHNFKR

SEQ ID NO: 3436 - protein, 11 aa, HUMAN IMMUNODEFICIENCY VIRUS
MAVFIHNFKRK

SEQ ID NO: 3437 - protein, 11 aa, HUMAN IMMUNODEFICIENCY VIRUS
ASDIQTKELQK

SEQ ID NO: 3438 - protein, 11 aa, HUMAN IMMUNODEFICIENCY VIRUS
ATDIQTKELQK

SEQ ID NO: 3439 - protein, 11 aa, HUMAN IMMUNODEFICIENCY VIRUS
QTKELQKQIIK

SEQ ID NO: 3440 - protein, 11 aa, HUMAN IMMUNODEFICIENCY VIRUS
QTKELQKQITK

SEQ ID NO: 3441 - protein, 11 aa, HUMAN IMMUNODEFICIENCY VIRUS
AVVIQDNSDIK

SEQ ID NO: 3442 - protein, 11 aa, HUMAN IMMUNODEFICIENCY VIRUS
AVVIQDNSEIK

SEQ ID NO: 3443 - protein, 11 aa, HUMAN IMMUNODEFICIENCY VIRUS
NSDIKVVPRRK

SEQ ID NO: 3444 - protein, 11 aa, HUMAN IMMUNODEFICIENCY VIRUS
NSEIKVVPRRK

SEQ ID NO: 3445 - protein, 11 aa, HUMAN IMMUNODEFICIENCY VIRUS
DIKVVPRRKAK

SEQ ID NO: 3446 - protein, 11 aa, HUMAN IMMUNODEFICIENCY VIRUS
EIKVVPRRKAK

SEQ ID NO: 3447 - protein, 11 aa, HUMAN IMMUNODEFICIENCY VIRUS
VVPRRKAKIIR

SEQ ID NO: 3448 - protein, 11 aa, HUMAN IMMUNODEFICIENCY VIRUS
QMAGDDCVAGR

SEQ ID NO: 3449 - protein, 11 aa, HUMAN IMMUNODEFICIENCY VIRUS
QMAGDDCVASR

SEQ ID NO: 3450 - protein, 8 aa, HUMAN IMMUNODEFICIENCY VIRUS
DSDEELLK

SEQ ID NO: 3451 - protein, 8 aa, HUMAN IMMUNODEFICIENCY VIRUS
QARKNRRR

SEQ ID NO: 3452 - protein, 8 aa, HUMAN IMMUNODEFICIENCY VIRUS
QARRNRRR

SEQ ID NO: 3453 - protein, 8 aa, HUMAN IMMUNODEFICIENCY VIRUS
RARQRQIR

SEQ ID NO: 3454 - protein, 8 aa, HUMAN IMMUNODEFICIENCY VIRUS
ILSTCLGR

SEQ ID NO: 3455 - protein, 8 aa, HUMAN IMMUNODEFICIENCY VIRUS
GTETGVGR

SEQ ID NO: 3456 - protein, 9 aa, HUMAN IMMUNODEFICIENCY VIRUS
LLKTVRLIK

SEQ ID NO: 3457 - protein, 9 aa, HUMAN IMMUNODEFICIENCY VIRUS
GTRQARKNR

SEQ ID NO: 3458 - protein, 9 aa, HUMAN IMMUNODEFICIENCY VIRUS
GTRQARRNR

SEQ ID NO: 3459 - protein, 9 aa, HUMAN IMMUNODEFICIENCY VIRUS
GTRQTRKNR

SEQ ID NO: 3460 - protein, 9 aa, HUMAN IMMUNODEFICIENCY VIRUS
TTRQARRNR

SEQ ID NO: 3461 - protein, 9 aa, HUMAN IMMUNODEFICIENCY VIRUS
QARKNRRRR

SEQ ID NO: 3462 - protein, 9 aa, HUMAN IMMUNODEFICIENCY VIRUS
QARRNRRRR

SEQ ID NO: 3463 - protein, 9 aa, HUMAN IMMUNODEFICIENCY VIRUS
RILSTCLGR

SEQ ID NO: 3464 - protein, 9 aa, HUMAN IMMUNODEFICIENCY VIRUS
PLQLPPIER

SEQ ID NO: 3465 - protein, 9 aa, HUMAN IMMUNODEFICIENCY VIRUS
PLQLPPLER

SEQ ID NO: 3466 - protein, 10 aa, HUMAN IMMUNODEFICIENCY VIRUS
PSPEGTRQAR

SEQ ID NO: 3467 - protein, 10 aa, HUMAN IMMUNODEFICIENCY VIRUS
GTRQARKNRR

SEQ ID NO: 3468 - protein, 10 aa, HUMAN IMMUNODEFICIENCY VIRUS
GTRQARRNRR

SEQ ID NO: 3469 - protein, 10 aa, HUMAN IMMUNODEFICIENCY VIRUS
GTRQTRKNRR

SEQ ID NO: 3470 - protein, 10 aa, HUMAN IMMUNODEFICIENCY VIRUS
TTRQARRNRR

SEQ ID NO: 3471 - protein, 11 aa, HUMAN IMMUNODEFICIENCY VIRUS
RSGDSDEELLK

SEQ ID NO: 3472 - protein, 11 aa, HUMAN IMMUNODEFICIENCY VIRUS
PSPEGTRQARR

SEQ ID NO: 3473 - protein, 11 aa, HUMAN IMMUNODEFICIENCY VIRUS
GTRQARKNRRR

SEQ ID NO: 3474 - protein, 11 aa, HUMAN IMMUNODEFICIENCY VIRUS
GTRQARRNRRR

SEQ ID NO: 3475 - protein, 11 aa, HUMAN IMMUNODEFICIENCY VIRUS
GTRQTRKNRRR

SEQ ID NO: 3476 - protein, 11 aa, HUMAN IMMUNODEFICIENCY VIRUS
TTRQARRNRRR

SEQ ID NO: 3477 - protein, 11 aa, HUMAN IMMUNODEFICIENCY VIRUS
QARKNRRRRWR

SEQ ID NO: 3478 - protein, 11 aa, HUMAN IMMUNODEFICIENCY VIRUS
QARRNRRRRWR

SEQ ID NO: 3479 - protein, 11 aa, HUMAN IMMUNODEFICIENCY VIRUS
PVPLQLPPIER

SEQ ID NO: 3480 - protein, 11 aa, HUMAN IMMUNODEFICIENCY VIRUS
PVPLQLPPLER

SEQ ID NO: 3481 - protein, 8 aa, HUMAN IMMUNODEFICIENCY VIRUS
GLGISYGR

SEQ ID NO: 3482 - protein, 8 aa, HUMAN IMMUNODEFICIENCY VIRUS
GISYGRKK

SEQ ID NO: 3483 - protein, 8 aa, HUMAN IMMUNODEFICIENCY VIRUS
ISYGRKKR

SEQ ID NO: 3484 - protein, 8 aa, HUMAN IMMUNODEFICIENCY VIRUS
PTGPKESK

SEQ ID NO: 3485 - protein, 9 aa, HUMAN IMMUNODEFICIENCY VIRUS
TACNNCYCK

SEQ ID NO: 3486 - protein, 9 aa, HUMAN IMMUNODEFICIENCY VIRUS
TACTNCYCK

SEQ ID NO: 3487 - protein, 9 aa, HUMAN IMMUNODEFICIENCY VIRUS
GLGISYGRK

SEQ ID NO: 3488 - protein, 9 aa, HUMAN IMMUNODEFICIENCY VIRUS
GISYGRKKR

SEQ ID NO: 3489 - protein, 9 aa, HUMAN IMMUNODEFICIENCY VIRUS
ISYGRKKRR

SEQ ID NO: 3490 - protein, 9 aa, HUMAN IMMUNODEFICIENCY VIRUS
PTGPKESKK

SEQ ID NO: 3491 - protein, 9 aa, HUMAN IMMUNODEFICIENCY VIRUS
ESKKKVESK

SEQ ID NO: 3492 - protein, 10 aa, HUMAN IMMUNODEFICIENCY VIRUS
PVDPRLEPWK

SEQ ID NO: 3493 - protein, 10 aa, HUMAN IMMUNODEFICIENCY VIRUS
TACNNCYCKK

SEQ ID NO: 3494 - protein, 10 aa, HUMAN IMMUNODEFICIENCY VIRUS
GLGISYGRKK

SEQ ID NO: 3495 - protein, 10 aa, HUMAN IMMUNODEFICIENCY VIRUS
GISYGRKKRR

SEQ ID NO: 3496 - protein, 10 aa, HUMAN IMMUNODEFICIENCY VIRUS
PTGPKESKKK

SEQ ID NO: 3497 - protein, 10 aa, HUMAN IMMUNODEFICIENCY VIRUS
KAGPGGYPRR

SEQ ID NO: 3498 - protein, 11 aa, HUMAN IMMUNODEFICIENCY VIRUS
GLGISYGRKKR

SEQ ID NO: 3499 - protein, 11 aa, HUMAN IMMUNODEFICIENCY VIRUS
ISYGRKKRRQR

SEQ ID NO: 3500 - protein, 11 aa, HUMAN IMMUNODEFICIENCY VIRUS
KAGPGGYPRRK

SEQ ID NO: 3501 - protein, 8 aa, HUMAN IMMUNODEFICIENCY VIRUS
LIVWQVDR

SEQ ID NO: 3502 - protein, 8 aa, HUMAN IMMUNODEFICIENCY VIRUS
MIVWQVDR

SEQ ID NO: 3503 - protein, 8 aa, HUMAN IMMUNODEFICIENCY VIRUS
QVDRMKIR

SEQ ID NO: 3504 - protein, 8 aa, HUMAN IMMUNODEFICIENCY VIRUS
QVDRMRIR

SEQ ID NO: 3505 - protein, 8 aa, HUMAN IMMUNODEFICIENCY VIRUS
RMRINTWK

SEQ ID NO: 3506 - protein, 8 aa, HUMAN IMMUNODEFICIENCY VIRUS
RMRIRTWK

SEQ ID NO: 3507 - protein, 8 aa, HUMAN IMMUNODEFICIENCY VIRUS
RTWKSLVK

SEQ ID NO: 3508 - protein, 8 aa, HUMAN IMMUNODEFICIENCY VIRUS
RTWNSLVK

SEQ ID NO: 3509 - protein, 8 aa, HUMAN IMMUNODEFICIENCY VIRUS
HIPLGDAR

SEQ ID NO: 3510 - protein, 8 aa, HUMAN IMMUNODEFICIENCY VIRUS
HIPLGEAR

SEQ ID NO: 3511 - protein, 8 aa, HUMAN IMMUNODEFICIENCY VIRUS
GVSIEWRK

SEQ ID NO: 3512 - protein, 8 aa, HUMAN IMMUNODEFICIENCY VIRUS
VSIEWRLR

SEQ ID NO: 3513 - protein, 8 aa, HUMAN IMMUNODEFICIENCY VIRUS
SIEWRLRR

SEQ ID NO: 3514 - protein, 8 aa, HUMAN IMMUNODEFICIENCY VIRUS
FSDSAIRK

SEQ ID NO: 3515 - protein, 8 aa, HUMAN IMMUNODEFICIENCY VIRUS
FSESAIRK

SEQ ID NO: 3516 - protein, 8 aa, HUMAN IMMUNODEFICIENCY VIRUS
SLQYLALK

SEQ ID NO: 3517 - protein, 8 aa, HUMAN IMMUNODEFICIENCY VIRUS
LALTALIK

SEQ ID NO: 3518 - protein, 8 aa, HUMAN IMMUNODEFICIENCY VIRUS
LTALIKPK

SEQ ID NO: 3519 - protein, 8 aa, HUMAN IMMUNODEFICIENCY VIRUS
TALIKPKK

SEQ ID NO: 3520 - protein, 8 aa, HUMAN IMMUNODEFICIENCY VIRUS
LIKPKKIK

SEQ ID NO: 3521 - protein, 8 aa, HUMAN IMMUNODEFICIENCY VIRUS
LTEDRWNK

SEQ ID NO: 3522 - protein, 8 aa, HUMAN IMMUNODEFICIENCY VIRUS
LVEDRWNK

SEQ ID NO: 3523 - protein, 9 aa, HUMAN IMMUNODEFICIENCY VIRUS
VMIVWQVDR

SEQ ID NO: 3524 - protein, 9 aa, HUMAN IMMUNODEFICIENCY VIRUS
IVWQVDRMK

SEQ ID NO: 3525 - protein, 9 aa, HUMAN IMMUNODEFICIENCY VIRUS
IVWQVDRMR

SEQ ID NO: 3526 - protein, 9 aa, HUMAN IMMUNODEFICIENCY VIRUS
GVSIEWRLR

SEQ ID NO: 3527 - protein, 9 aa, HUMAN IMMUNODEFICIENCY VIRUS
VSIEWRLRR

SEQ ID NO: 3528 - protein, 9 aa, HUMAN IMMUNODEFICIENCY VIRUS
GSLQYLALK

SEQ ID NO: 3529 - protein, 9 aa, HUMAN IMMUNODEFICIENCY VIRUS
YLALTALIK

SEQ ID NO: 3530 - protein, 9 aa, HUMAN IMMUNODEFICIENCY VIRUS
ALTALIKPK

SEQ ID NO: 3531 - protein, 9 aa, HUMAN IMMUNODEFICIENCY VIRUS
LTALIKPKK

SEQ ID NO: 3532 - protein, 9 aa, HUMAN IMMUNODEFICIENCY VIRUS
ALIKPKKIK

SEQ ID NO: 3533 - protein, 9 aa, HUMAN IMMUNODEFICIENCY VIRUS
SVKKLTEDR

SEQ ID NO: 3534 - protein, 9 aa, HUMAN IMMUNODEFICIENCY VIRUS
KLTEDRWNK

SEQ ID NO: 3535 - protein, 9 aa, HUMAN IMMUNODEFICIENCY VIRUS
KLVEDRWNK

SEQ ID NO: 3536 - protein, 10 aa, HUMAN IMMUNODEFICIENCY VIRUS
QVMIVWQVDR

SEQ ID NO: 3537 - protein, 10 aa, HUMAN IMMUNODEFICIENCY VIRUS
MIVWQVDRMR

SEQ ID NO: 3538 - protein, 10 aa, HUMAN IMMUNODEFICIENCY VIRUS
KIRTWNSLVK

SEQ ID NO: 3539 - protein, 10 aa, HUMAN IMMUNODEFICIENCY VIRUS
RIRTWKSLVK

SEQ ID NO: 3540 - protein, 10 aa, HUMAN IMMUNODEFICIENCY VIRUS
RIRTWNSLVK

SEQ ID NO: 3541 - protein, 10 aa, HUMAN IMMUNODEFICIENCY VIRUS
LVKHHMYVSK

SEQ ID NO: 3542 - protein, 10 aa, HUMAN IMMUNODEFICIENCY VIRUS
EVHIPLGDAR

SEQ ID NO: 3543 - protein, 10 aa, HUMAN IMMUNODEFICIENCY VIRUS
EVHIPLGEAR

SEQ ID NO: 3544 - protein, 10 aa, HUMAN IMMUNODEFICIENCY VIRUS
GVSIEWRLRR

SEQ ID NO: 3545 - protein, 10 aa, HUMAN IMMUNODEFICIENCY VIRUS
LALTALIKPK

SEQ ID NO: 3546 - protein, 10 aa, HUMAN IMMUNODEFICIENCY VIRUS
ALTALIKPKK

SEQ ID NO: 3547 - protein, 10 aa, HUMAN IMMUNODEFICIENCY VIRUS
PSVKKLTEDR

SEQ ID NO: 3548 - protein, 11 aa, HUMAN IMMUNODEFICIENCY VIRUS
VMIVWQVDRMR

SEQ ID NO: 3549 - protein, 11 aa, HUMAN IMMUNODEFICIENCY VIRUS
IVWQVDRMKIR

SEQ ID NO: 3550 - protein, 11 aa, HUMAN IMMUNODEFICIENCY VIRUS
IVWQVDRMRIR

SEQ ID NO: 3551 - protein, 11 aa, HUMAN IMMUNODEFICIENCY VIRUS
QVDRMRINTWK

SEQ ID NO: 3552 - protein, 11 aa, HUMAN IMMUNODEFICIENCY VIRUS
QVDRMRIRTWK

SEQ ID NO: 3553 - protein, 11 aa, HUMAN IMMUNODEFICIENCY VIRUS
SLVKHHMYVSK

SEQ ID NO: 3554 - protein, 11 aa, HUMAN IMMUNODEFICIENCY VIRUS
LVKHHMYVSKK

SEQ ID NO: 3555 - protein, 11 aa, HUMAN IMMUNODEFICIENCY VIRUS
TTYWGLHTGER

SEQ ID NO: 3556 - protein, 11 aa, HUMAN IMMUNODEFICIENCY VIRUS
HLGHGVSIEWR

SEQ ID NO: 3557 - protein, 11 aa, HUMAN IMMUNODEFICIENCY VIRUS
HLGQGVSIEWR

SEQ ID NO: 3558 - protein, 11 aa, HUMAN IMMUNODEFICIENCY VIRUS
YLALTALIKPK

SEQ ID NO: 3559 - protein, 11 aa, HUMAN IMMUNODEFICIENCY VIRUS
LALTALIKPKK

SEQ ID NO: 3560 - protein, 11 aa, HUMAN IMMUNODEFICIENCY VIRUS
LTEDRWNKPQK

SEQ ID NO: 3561 - protein, 11 aa, HUMAN IMMUNODEFICIENCY VIRUS
LVEDRWNKPQK

SEQ ID NO: 3562 - protein, 8 aa, HUMAN IMMUNODEFICIENCY VIRUS
ELKNEAVR

SEQ ID NO: 3563 - protein, 8 aa, HUMAN IMMUNODEFICIENCY VIRUS
ELKSEAVR

SEQ ID NO: 3564 - protein, 8 aa, HUMAN IMMUNODEFICIENCY VIRUS
EAVRHFPR

SEQ ID NO: 3565 - protein, 8 aa, HUMAN IMMUNODEFICIENCY VIRUS
QLLFIHFR

SEQ ID NO: 3566 - protein, 8 aa, HUMAN IMMUNODEFICIENCY VIRUS
QLLFVHFR

SEQ ID NO: 3567 - protein, 8 aa, HUMAN IMMUNODEFICIENCY VIRUS
RIGCQHSR

SEQ ID NO: 3568 - protein, 8 aa, HUMAN IMMUNODEFICIENCY VIRUS
RIGCRHSR

SEQ ID NO: 3569 - protein, 8 aa, HUMAN IMMUNODEFICIENCY VIRUS
HSRIGIIR

SEQ ID NO: 3570 - protein, 8 aa, HUMAN IMMUNODEFICIENCY VIRUS
HSRIGITR

SEQ ID NO: 3571 - protein, 8 aa, HUMAN IMMUNODEFICIENCY VIRUS
RIGITRQR

SEQ ID NO: 3572 - protein, 7 aa, HUMAN IMMUNODEFICIENCY VIRUS
LPGRRGR

SEQ ID NO: 3573 - protein, 8 aa, HUMAN IMMUNODEFICIENCY VIRUS
NIRGRRVR

SEQ ID NO: 3574 - protein, 8 aa, HUMAN IMMUNODEFICIENCY VIRUS
RARNGASR

SEQ ID NO: 3575 - protein, 9 aa, HUMAN IMMUNODEFICIENCY VIRUS
ALELLEELK

SEQ ID NO: 3576 - protein, 9 aa, HUMAN IMMUNODEFICIENCY VIRUS
TLELLEELK

SEQ ID NO: 3577 - protein, 9 aa, HUMAN IMMUNODEFICIENCY VIRUS
WAGVEAIIR

SEQ ID NO: 3578 - protein, 9 aa, HUMAN IMMUNODEFICIENCY VIRUS
FIHFRIGCR

SEQ ID NO: 3579 - protein, 9 aa, HUMAN IMMUNODEFICIENCY VIRUS
RIGITRQRR

SEQ ID NO: 3580 - protein, 10 aa, HUMAN IMMUNODEFICIENCY VIRUS
QAPEDQGPQR

SEQ ID NO: 3581 - protein, 10 aa, HUMAN IMMUNODEFICIENCY VIRUS
WALELLEELK

SEQ ID NO: 3582 - protein, 10 aa, HUMAN IMMUNODEFICIENCY VIRUS
WTLELLEELK

SEQ ID NO: 3583 - protein, 10 aa, HUMAN IMMUNODEFICIENCY VIRUS
KSEAVRHFPR

SEQ ID NO: 3584 - protein, 10 aa, HUMAN IMMUNODEFICIENCY VIRUS
HSRIGITRQR

SEQ ID NO: 3585 - protein, 11 aa, HUMAN IMMUNODEFICIENCY VIRUS
LLEELKNEAVR

SEQ ID NO: 3586 - protein, 11 aa, HUMAN IMMUNODEFICIENCY VIRUS
LLEELKSEAVR

SEQ ID NO: 3587 - protein, 11 aa, HUMAN IMMUNODEFICIENCY VIRUS
DTWAGVEAIIR

SEQ ID NO: 3588 - protein, 11 aa, HUMAN IMMUNODEFICIENCY VIRUS
DTWEGVEAIIR

SEQ ID NO: 3589 - protein, 11 aa, HUMAN IMMUNODEFICIENCY VIRUS
ILQQLLFIHFR

SEQ ID NO: 3590 - protein, 11 aa, HUMAN IMMUNODEFICIENCY VIRUS
LLFIHFRIGCR

SEQ ID NO: 3591 - protein, 11 aa, HUMAN IMMUNODEFICIENCY VIRUS
HSRIGITRQRR

SEQ ID NO: 3592 - protein, 8 aa, HUMAN IMMUNODEFICIENCY VIRUS
TIVFIEYR

SEQ ID NO: 3593 - protein, 8 aa, HUMAN IMMUNODEFICIENCY VIRUS
IVFIEYRK

SEQ ID NO: 3594 - protein, 8 aa, HUMAN IMMUNODEFICIENCY VIRUS
LVQRKQDR

SEQ ID NO: 3595 - protein, 8 aa, HUMAN IMMUNODEFICIENCY VIRUS
KIDRLIDR

SEQ ID NO: 3596 - protein, 8 aa, HUMAN IMMUNODEFICIENCY VIRUS
LIDRIRER

SEQ ID NO: 3597 - protein, 8 aa, HUMAN IMMUNODEFICIENCY VIRUS
VTLLSSSK

SEQ ID NO: 3598 - protein, 9 aa, HUMAN IMMUNODEFICIENCY VIRUS
WTIVFIEYR

SEQ ID NO: 3599 - protein, 9 aa, HUMAN IMMUNODEFICIENCY VIRUS
LVQRKQDRR

SEQ ID NO: 3600 - protein, 9 aa, HUMAN IMMUNODEFICIENCY VIRUS
ILRQRKIDR

SEQ ID NO: 3601 - protein, 9 aa, HUMAN IMMUNODEFICIENCY VIRUS
RLIDRIRER

SEQ ID NO: 3602 - protein, 9 aa, HUMAN IMMUNODEFICIENCY VIRUS
LVTLLSSSK

SEQ ID NO: 3603 - protein, 10 aa, HUMAN IMMUNODEFICIENCY VIRUS
KILRQRKIDR

SEQ ID NO: 3604 - protein, 10 aa, HUMAN IMMUNODEFICIENCY VIRUS
KIDRLIDRIR

SEQ ID NO: 3605 - protein, 11 aa, HUMAN IMMUNODEFICIENCY VIRUS
VVWTIVFIEYR

SEQ ID NO: 3606 - protein, 8 aa, HUMAN IMMUNODEFICIENCY VIRUS
LILGLVII

SEQ ID NO: 3607 - protein, 8 aa, HUMAN IMMUNODEFICIENCY VIRUS
KLWVTVYY

SEQ ID NO: 3608 - protein, 8 aa, HUMAN IMMUNODEFICIENCY VIRUS
NLWVTVYY

SEQ ID NO: 3609 - protein, 8 aa, HUMAN IMMUNODEFICIENCY VIRUS
VYYGVPVW

SEQ ID NO: 3610 - protein, 8 aa, HUMAN IMMUNODEFICIENCY VIRUS
DTEVHNVW

SEQ ID NO: 3611 - protein, 8 aa, HUMAN IMMUNODEFICIENCY VIRUS
NVTENFNM

SEQ ID NO: 3612 - protein, 8 aa, HUMAN IMMUNODEFICIENCY VIRUS
VTENFNMW

SEQ ID NO: 3613 - protein, 8 aa, HUMAN IMMUNODEFICIENCY VIRUS
SLKPCVKL

SEQ ID NO: 3614 - protein, 8 aa, HUMAN IMMUNODEFICIENCY VIRUS
LTPLCVTL

SEQ ID NO: 3615 - protein, 8 aa, HUMAN IMMUNODEFICIENCY VIRUS
HYCAPAGF

SEQ ID NO: 3616 - protein, 8 aa, HUMAN IMMUNODEFICIENCY VIRUS
HYCTPAGF

SEQ ID NO: 3617 - protein, 8 aa, HUMAN IMMUNODEFICIENCY VIRUS
CTPAGFAI

SEQ ID NO: 3618 - protein, 8 aa, HUMAN IMMUNODEFICIENCY VIRUS
TVQCTHGI

SEQ ID NO: 3619 - protein, 8 aa, HUMAN IMMUNODEFICIENCY VIRUS
PVVSTQLL

SEQ ID NO: 3620 - protein, 8 aa, HUMAN IMMUNODEFICIENCY VIRUS
VVSTQLLL

SEQ ID NO: 3621 - protein, 8 aa, HUMAN IMMUNODEFICIENCY VIRUS
QLLLNGSL

SEQ ID NO: 3622 - protein, 8 aa, HUMAN IMMUNODEFICIENCY VIRUS
NTRKSIRI

SEQ ID NO: 3623 - protein, 8 aa, HUMAN IMMUNODEFICIENCY VIRUS
RIGPGQTF

SEQ ID NO: 3624 - protein, 8 aa, HUMAN IMMUNODEFICIENCY VIRUS
GIGPGQTF

SEQ ID NO: 3625 - protein, 8 aa, HUMAN IMMUNODEFICIENCY VIRUS
SIGSGQAF

SEQ ID NO: 3626 - protein, 8 aa, HUMAN IMMUNODEFICIENCY VIRUS
FYATGDII

SEQ ID NO: 3627 - protein, 8 aa, HUMAN IMMUNODEFICIENCY VIRUS
KLREIRQF

SEQ ID NO: 3628 - protein, 8 aa, HUMAN IMMUNODEFICIENCY VIRUS
SFNCGGEF

SEQ ID NO: 3629 - protein, 8 aa, HUMAN IMMUNODEFICIENCY VIRUS
SFNCRGEF

SEQ ID NO: 3630 - protein, 8 aa, HUMAN IMMUNODEFICIENCY VIRUS
FYCNTSGL

SEQ ID NO: 3631 - protein, 8 aa, HUMAN IMMUNODEFICIENCY VIRUS
HTEGNITL

SEQ ID NO: 3632 - protein, 8 aa, HUMAN IMMUNODEFICIENCY VIRUS
NITLPCRI

SEQ ID NO: 3633 - protein, 8 aa, HUMAN IMMUNODEFICIENCY VIRUS
TITLPCRI

SEQ ID NO: 3634 - protein, 8 aa, HUMAN IMMUNODEFICIENCY VIRUS
RIKQIINM

SEQ ID NO: 3635 - protein, 8 aa, HUMAN IMMUNODEFICIENCY VIRUS
RIKQIVNM

SEQ ID NO: 3636 - protein, 8 aa, HUMAN IMMUNODEFICIENCY VIRUS
QIRCSSNI

SEQ ID NO: 3637 - protein, 8 aa, HUMAN IMMUNODEFICIENCY VIRUS
STNGTETF

SEQ ID NO: 3638 - protein, 8 aa, HUMAN IMMUNODEFICIENCY VIRUS
KVVKIEPL

SEQ ID NO: 3639 - protein, 8 aa, HUMAN IMMUNODEFICIENCY VIRUS
AVGIGAVF

SEQ ID NO: 3640 - protein, 8 aa, HUMAN IMMUNODEFICIENCY VIRUS
STMGAASI

SEQ ID NO: 3641 - protein, 8 aa, HUMAN IMMUNODEFICIENCY VIRUS
LTVQARQL

SEQ ID NO: 3642 - protein, 8 aa, HUMAN IMMUNODEFICIENCY VIRUS
TVQARQLL

SEQ ID NO: 3643 - protein, 8 aa, HUMAN IMMUNODEFICIENCY VIRUS
IVQQQNNL

SEQ ID NO: 3644 - protein, 8 aa, HUMAN IMMUNODEFICIENCY VIRUS
IVQQQSNL

SEQ ID NO: 3645 - protein, 8 aa, HUMAN IMMUNODEFICIENCY VIRUS
AIEAQQHL

SEQ ID NO: 3646 - protein, 8 aa, HUMAN IMMUNODEFICIENCY VIRUS
HLLKLTVW

SEQ ID NO: 3647 - protein, 8 aa, HUMAN IMMUNODEFICIENCY VIRUS
HLLQLTVW

SEQ ID NO: 3648 - protein, 8 aa, HUMAN IMMUNODEFICIENCY VIRUS
HMLQLTVW

SEQ ID NO: 3649 - protein, 8 aa, HUMAN IMMUNODEFICIENCY VIRUS
TVWGIKQL

SEQ ID NO: 3650 - protein, 8 aa, HUMAN IMMUNODEFICIENCY VIRUS
RVLAVERY

SEQ ID NO: 3651 - protein, 8 aa, HUMAN IMMUNODEFICIENCY VIRUS
VLAVERYL

SEQ ID NO: 3652 - protein, 8 aa, HUMAN IMMUNODEFICIENCY VIRUS
RYLKDQQL

SEQ ID NO: 3653 - protein, 8 aa, HUMAN IMMUNODEFICIENCY VIRUS
RYLRDQQL

SEQ ID NO: 3654 - protein, 8 aa, HUMAN IMMUNODEFICIENCY VIRUS
YLKDQQLL

SEQ ID NO: 3655 - protein, 8 aa, HUMAN IMMUNODEFICIENCY VIRUS
YLRDQQLL

SEQ ID NO: 3656 - protein, 8 aa, HUMAN IMMUNODEFICIENCY VIRUS
IWGCSGKL

SEQ ID NO: 3657 - protein, 8 aa, HUMAN IMMUNODEFICIENCY VIRUS
NVPWNSSW

SEQ ID NO: 3658 - protein, 8 aa, HUMAN IMMUNODEFICIENCY VIRUS
EIWDNMTW

SEQ ID NO: 3659 - protein, 8 aa, HUMAN IMMUNODEFICIENCY VIRUS
IWDNMTWM

SEQ ID NO: 3660 - protein, 8 aa, HUMAN IMMUNODEFICIENCY VIRUS
IWNNMTWM

SEQ ID NO: 3661 - protein, 8 aa, HUMAN IMMUNODEFICIENCY VIRUS
WMEWEREI

SEQ ID NO: 3662 - protein, 8 aa, HUMAN IMMUNODEFICIENCY VIRUS
DLLALDKW

SEQ ID NO: 3663 - protein, 8 aa, HUMAN IMMUNODEFICIENCY VIRUS
ELLELDKW

SEQ ID NO: 3664 - protein, 8 aa, HUMAN IMMUNODEFICIENCY VIRUS
ALDKWASL

SEQ ID NO: 3665 - protein, 8 aa, HUMAN IMMUNODEFICIENCY VIRUS
ELDKWASL

SEQ ID NO: 3666 - protein, 8 aa, HUMAN IMMUNODEFICIENCY VIRUS
KWASLWNW

SEQ ID NO: 3667 - protein, 8 aa, HUMAN IMMUNODEFICIENCY VIRUS
SLWNWFDI

SEQ ID NO: 3668 - protein, 8 aa, HUMAN IMMUNODEFICIENCY VIRUS
WFDITNWL

SEQ ID NO: 3669 - protein, 8 aa, HUMAN IMMUNODEFICIENCY VIRUS
DITNWLWY

SEQ ID NO: 3670 - protein, 8 aa, HUMAN IMMUNODEFICIENCY VIRUS
ITKWLWYI

SEQ ID NO: 3671 - protein, 8 aa, HUMAN IMMUNODEFICIENCY VIRUS
ITNWLWYI

SEQ ID NO: 3672 - protein, 8 aa, HUMAN IMMUNODEFICIENCY VIRUS
KWLWYIKI

SEQ ID NO: 3673 - protein, 8 aa, HUMAN IMMUNODEFICIENCY VIRUS
NWLWYIKI

SEQ ID NO: 3674 - protein, 8 aa, HUMAN IMMUNODEFICIENCY VIRUS
WLWYIKIF

SEQ ID NO: 3675 - protein, 8 aa, HUMAN IMMUNODEFICIENCY VIRUS
LWYIKIFI

SEQ ID NO: 3676 - protein, 8 aa, HUMAN IMMUNODEFICIENCY VIRUS
WYIKIFIM

SEQ ID NO: 3677 - protein, 8 aa, HUMAN IMMUNODEFICIENCY VIRUS
YIKIFIMI

SEQ ID NO: 3678 - protein, 8 aa, HUMAN IMMUNODEFICIENCY VIRUS
FIMIVGGL

SEQ ID NO: 3679 - protein, 8 aa, HUMAN IMMUNODEFICIENCY VIRUS
IMIVGGLI

SEQ ID NO: 3680 - protein, 8 aa, HUMAN IMMUNODEFICIENCY VIRUS
IVGGLIGL

SEQ ID NO: 3681 - protein, 8 aa, HUMAN IMMUNODEFICIENCY VIRUS
IVGGLVGL

SEQ ID NO: 3682 - protein, 8 aa, HUMAN IMMUNODEFICIENCY VIRUS
GLIGLRII

SEQ ID NO: 3683 - protein, 8 aa, HUMAN IMMUNODEFICIENCY VIRUS
LIGLRIIF

SEQ ID NO: 3684 - protein, 8 aa, HUMAN IMMUNODEFICIENCY VIRUS
LIGLRIVF

SEQ ID NO: 3685 - protein, 8 aa, HUMAN IMMUNODEFICIENCY VIRUS
IIFAVLSI

SEQ ID NO: 3686 - protein, 8 aa, HUMAN IMMUNODEFICIENCY VIRUS
IVFAVLSI

SEQ ID NO: 3687 - protein, 8 aa, HUMAN IMMUNODEFICIENCY VIRUS
PLSFQTLL

SEQ ID NO: 3688 - protein, 8 aa, HUMAN IMMUNODEFICIENCY VIRUS
SIRLVNGF

SEQ ID NO: 3689 - protein, 8 aa, HUMAN IMMUNODEFICIENCY VIRUS
SIRLVSGF

SEQ ID NO: 3690 - protein, 8 aa, HUMAN IMMUNODEFICIENCY VIRUS
LVNGFLAL

SEQ ID NO: 3691 - protein, 8 aa, HUMAN IMMUNODEFICIENCY VIRUS
LVSGFLAL

SEQ ID NO: 3692 - protein, 8 aa, HUMAN IMMUNODEFICIENCY VIRUS
AWDDLRSL

SEQ ID NO: 3693 - protein, 8 aa, HUMAN IMMUNODEFICIENCY VIRUS
DLRNLCLF

SEQ ID NO: 3694 - protein, 8 aa, HUMAN IMMUNODEFICIENCY VIRUS
DLRSLCLF

SEQ ID NO: 3695 - protein, 8 aa, HUMAN IMMUNODEFICIENCY VIRUS
CLFSYHRL

SEQ ID NO: 3696 - protein, 8 aa, HUMAN IMMUNODEFICIENCY VIRUS
SYHRLRDF

SEQ ID NO: 3697 - protein, 8 aa, HUMAN IMMUNODEFICIENCY VIRUS
SYHRLRDL

SEQ ID NO: 3698 - protein, 8 aa, HUMAN IMMUNODEFICIENCY VIRUS
RLRDLLLI

SEQ ID NO: 3699 - protein, 8 aa, HUMAN IMMUNODEFICIENCY VIRUS
ELLGHSSL

SEQ ID NO: 3700 - protein, 8 aa, HUMAN IMMUNODEFICIENCY VIRUS
ELLGRRGW

SEQ ID NO: 3701 - protein, 8 aa, HUMAN IMMUNODEFICIENCY VIRUS
GWEALKYL

SEQ ID NO: 3702 - protein, 8 aa, HUMAN IMMUNODEFICIENCY VIRUS
GWEGLKYL

SEQ ID NO: 3703 - protein, 8 aa, HUMAN IMMUNODEFICIENCY VIRUS
YWWNLLQY

SEQ ID NO: 3704 - protein, 8 aa, HUMAN IMMUNODEFICIENCY VIRUS
WWNLLQYW

SEQ ID NO: 3705 - protein, 8 aa, HUMAN IMMUNODEFICIENCY VIRUS
SLLNATAI

SEQ ID NO: 3706 - protein, 8 aa, HUMAN IMMUNODEFICIENCY VIRUS
ILHIPRRI

SEQ ID NO: 3707 - protein, 8 aa, HUMAN IMMUNODEFICIENCY VIRUS
PTRIRQGL

SEQ ID NO: 3708 - protein, 9 aa, HUMAN IMMUNODEFICIENCY VIRUS
TVYYGVPVW

SEQ ID NO: 3709 - protein, 9 aa, HUMAN IMMUNODEFICIENCY VIRUS
VWKEATTTL

SEQ ID NO: 3710 - protein, 9 aa, HUMAN IMMUNODEFICIENCY VIRUS
PTDPNPQEI

SEQ ID NO: 3711 - protein, 9 aa, HUMAN IMMUNODEFICIENCY VIRUS
NVTENFNMW

SEQ ID NO: 3712 - protein, 9 aa, HUMAN IMMUNODEFICIENCY VIRUS
NFNMWKNDM

SEQ ID NO: 3713 - protein, 9 aa, HUMAN IMMUNODEFICIENCY VIRUS
NFNMWKNNM

SEQ ID NO: 3714 - protein, 9 aa, HUMAN IMMUNODEFICIENCY VIRUS
MVEQMHEDI

SEQ ID NO: 3715 - protein, 9 aa, HUMAN IMMUNODEFICIENCY VIRUS
QMHEDIISL

SEQ ID NO: 3716 - protein, 9 aa, HUMAN IMMUNODEFICIENCY VIRUS
IISLWDQSL

SEQ ID NO: 3717 - protein, 9 aa, HUMAN IMMUNODEFICIENCY VIRUS
VISLWDQSL

SEQ ID NO: 3718 - protein, 9 aa, HUMAN IMMUNODEFICIENCY VIRUS
KLTPLCVTL

SEQ ID NO: 3719 - protein, 9 aa, HUMAN IMMUNODEFICIENCY VIRUS
EIKNCSFNI

SEQ ID NO: 3720 - protein, 9 aa, HUMAN IMMUNODEFICIENCY VIRUS
LINCNTSAI

SEQ ID NO: 3721 - protein, 9 aa, HUMAN IMMUNODEFICIENCY VIRUS
KVSFEPIPI

SEQ ID NO: 3722 - protein, 9 aa, HUMAN IMMUNODEFICIENCY VIRUS
SFEPIPIHY

SEQ ID NO: 3723 - protein, 9 aa, HUMAN IMMUNODEFICIENCY VIRUS
ILKCNDKKF

SEQ ID NO: 3724 - protein, 9 aa, HUMAN IMMUNODEFICIENCY VIRUS
STVQCTHGI

SEQ ID NO: 3725 - protein, 9 aa, HUMAN IMMUNODEFICIENCY VIRUS
PVVSTQLLL

SEQ ID NO: 3726 - protein, 9 aa, HUMAN IMMUNODEFICIENCY VIRUS
SLAEEEVVI

SEQ ID NO: 3727 - protein, 9 aa, HUMAN IMMUNODEFICIENCY VIRUS
RIGPGQTFY

SEQ ID NO: 3728 - protein, 9 aa, HUMAN IMMUNODEFICIENCY VIRUS
GIGPGQTFY

SEQ ID NO: 3729 - protein, 9 aa, HUMAN IMMUNODEFICIENCY VIRUS
SIGSGQAFY

SEQ ID NO: 3730 - protein, 9 aa, HUMAN IMMUNODEFICIENCY VIRUS
ATGDIIGDI

SEQ ID NO: 3731 - protein, 9 aa, HUMAN IMMUNODEFICIENCY VIRUS
DIRQAHCNI

SEQ ID NO: 3732 - protein, 9 aa, HUMAN IMMUNODEFICIENCY VIRUS
DLEITTHSF

SEQ ID NO: 3733 - protein, 9 aa, HUMAN IMMUNODEFICIENCY VIRUS
SFNCGGEFF

SEQ ID NO: 3734 - protein, 9 aa, HUMAN IMMUNODEFICIENCY VIRUS
SFNCRGEFF

SEQ ID NO: 3735 - protein, 9 aa, HUMAN IMMUNODEFICIENCY VIRUS
FFYCNTSGL

SEQ ID NO: 3736 - protein, 9 aa, HUMAN IMMUNODEFICIENCY VIRUS
FYCNTSGLF

SEQ ID NO: 3737 - protein, 9 aa, HUMAN IMMUNODEFICIENCY VIRUS
TLPCRIKQI

SEQ ID NO: 3738 - protein, 9 aa, HUMAN IMMUNODEFICIENCY VIRUS
RIKQIINMW

SEQ ID NO: 3739 - protein, 9 aa, HUMAN IMMUNODEFICIENCY VIRUS
RIKQIVNMW

SEQ ID NO: 3740 - protein, 9 aa, HUMAN IMMUNODEFICIENCY VIRUS
MWQEVGKAM

SEQ ID NO: 3741 - protein, 9 aa, HUMAN IMMUNODEFICIENCY VIRUS
MWQRVGQAM

SEQ ID NO: 3742 - protein, 9 aa, HUMAN IMMUNODEFICIENCY VIRUS
IFRPGGGDM

SEQ ID NO: 3743 - protein, 9 aa, HUMAN IMMUNODEFICIENCY VIRUS
TFRPGGGDM

SEQ ID NO: 3744 - protein, 9 aa, HUMAN IMMUNODEFICIENCY VIRUS
NWRSELYKY

SEQ ID NO: 3745 - protein, 9 aa, HUMAN IMMUNODEFICIENCY VIRUS
LYKYKVVEI

SEQ ID NO: 3746 - protein, 9 aa, HUMAN IMMUNODEFICIENCY VIRUS
LYKYKVVKI

SEQ ID NO: 3747 - protein, 9 aa, HUMAN IMMUNODEFICIENCY VIRUS
AVGIGAVFL

SEQ ID NO: 3748 - protein, 9 aa, HUMAN IMMUNODEFICIENCY VIRUS
GIGAVFLGF

SEQ ID NO: 3749 - protein, 9 aa, HUMAN IMMUNODEFICIENCY VIRUS
MLGAMFLGF

SEQ ID NO: 3750 - protein, 9 aa, HUMAN IMMUNODEFICIENCY VIRUS
TIGAMFLGF

SEQ ID NO: 3751 - protein, 9 aa, HUMAN IMMUNODEFICIENCY VIRUS
FLGAAGSTM

SEQ ID NO: 3752 - protein, 9 aa, HUMAN IMMUNODEFICIENCY VIRUS
TMGAASITL

SEQ ID NO: 3753 - protein, 9 aa, HUMAN IMMUNODEFICIENCY VIRUS
TLTVQARQL

SEQ ID NO: 3754 - protein, 9 aa, HUMAN IMMUNODEFICIENCY VIRUS
LTVQARQLL

SEQ ID NO: 3755 - protein, 9 aa, HUMAN IMMUNODEFICIENCY VIRUS
GIVQQQNNL

SEQ ID NO: 3756 - protein, 9 aa, HUMAN IMMUNODEFICIENCY VIRUS
GIVQQQSNL

SEQ ID NO: 3757 - protein, 9 aa, HUMAN IMMUNODEFICIENCY VIRUS
IVQQQNNLL

SEQ ID NO: 3758 - protein, 9 aa, HUMAN IMMUNODEFICIENCY VIRUS
IVQQQSNLL

SEQ ID NO: 3759 - protein, 9 aa, HUMAN IMMUNODEFICIENCY VIRUS
AIEAQQHLL

SEQ ID NO: 3760 - protein, 9 aa, HUMAN IMMUNODEFICIENCY VIRUS
LLKLTVWGI

SEQ ID NO: 3761 - protein, 9 aa, HUMAN IMMUNODEFICIENCY VIRUS
LLQLTVWGI

SEQ ID NO: 3762 - protein, 9 aa, HUMAN IMMUNODEFICIENCY VIRUS
MLQLTVWGI

SEQ ID NO: 3763 - protein, 9 aa, HUMAN IMMUNODEFICIENCY VIRUS
LTVWGIKQL

SEQ ID NO: 3764 - protein, 9 aa, HUMAN IMMUNODEFICIENCY VIRUS
RVLAVERYL

SEQ ID NO: 3765 - protein, 9 aa, HUMAN IMMUNODEFICIENCY VIRUS
RYLKDQQLL

SEQ ID NO: 3766 - protein, 9 aa, HUMAN IMMUNODEFICIENCY VIRUS
RYLRDQQLL

SEQ ID NO: 3767 - protein, 9 aa, HUMAN IMMUNODEFICIENCY VIRUS
GIWGCSGKL

SEQ ID NO: 3768 - protein, 9 aa, HUMAN IMMUNODEFICIENCY VIRUS
IWGCSGKLI

SEQ ID NO: 3769 - protein, 9 aa, HUMAN IMMUNODEFICIENCY VIRUS
LICTTAVPW

SEQ ID NO: 3770 - protein, 9 aa, HUMAN IMMUNODEFICIENCY VIRUS
LICTTNVPW

SEQ ID NO: 3771 - protein, 9 aa, HUMAN IMMUNODEFICIENCY VIRUS
LICTTTVPW

SEQ ID NO: 3772 - protein, 9 aa, HUMAN IMMUNODEFICIENCY VIRUS
TWMEWEREI

SEQ ID NO: 3773 - protein, 9 aa, HUMAN IMMUNODEFICIENCY VIRUS
EWEREIDNY

SEQ ID NO: 3774 - protein, 9 aa, HUMAN IMMUNODEFICIENCY VIRUS
ALDKWASLW

SEQ ID NO: 3775 - protein, 9 aa, HUMAN IMMUNODEFICIENCY VIRUS
ELDKWASLW

SEQ ID NO: 3776 - protein, 9 aa, HUMAN IMMUNODEFICIENCY VIRUS
KWASLWNWF

SEQ ID NO: 3777 - protein, 9 aa, HUMAN IMMUNODEFICIENCY VIRUS
WFDITNWLW

SEQ ID NO: 3778 - protein, 9 aa, HUMAN IMMUNODEFICIENCY VIRUS
DITNWLWYI

SEQ ID NO: 3779 - protein, 9 aa, HUMAN IMMUNODEFICIENCY VIRUS
KWLWYIKIF

SEQ ID NO: 3780 - protein, 9 aa, HUMAN IMMUNODEFICIENCY VIRUS
NWLWYIKIF

SEQ ID NO: 3781 - protein, 9 aa, HUMAN IMMUNODEFICIENCY VIRUS
WLWYIKIFI

SEQ ID NO: 3782 - protein, 9 aa, HUMAN IMMUNODEFICIENCY VIRUS
LWYIKIFIM

SEQ ID NO: 3783 - protein, 9 aa, HUMAN IMMUNODEFICIENCY VIRUS
WYIKIFIMI

SEQ ID NO: 3784 - protein, 9 aa, HUMAN IMMUNODEFICIENCY VIRUS
IFIMIVGGL

SEQ ID NO: 3785 - protein, 9 aa, HUMAN IMMUNODEFICIENCY VIRUS
FIMIVGGLI

SEQ ID NO: 3786 - protein, 9 aa, HUMAN IMMUNODEFICIENCY VIRUS
MIVGGLIGL

SEQ ID NO: 3787 - protein, 9 aa, HUMAN IMMUNODEFICIENCY VIRUS
GLIGLRIIF

SEQ ID NO: 3788 - protein, 9 aa, HUMAN IMMUNODEFICIENCY VIRUS
GLIGLRIVF

SEQ ID NO: 3789 - protein, 9 aa, HUMAN IMMUNODEFICIENCY VIRUS
GLRIIFAVL

SEQ ID NO: 3790 - protein, 9 aa, HUMAN IMMUNODEFICIENCY VIRUS
GLRIVFAVL

SEQ ID NO: 3791 - protein, 9 aa, HUMAN IMMUNODEFICIENCY VIRUS
RIIFAVLSI

SEQ ID NO: 3792 - protein, 9 aa, HUMAN IMMUNODEFICIENCY VIRUS
RIVFAVLSI

SEQ ID NO: 3793 - protein, 9 aa, HUMAN IMMUNODEFICIENCY VIRUS
IVNRVRQGY

SEQ ID NO: 3794 - protein, 9 aa, HUMAN IMMUNODEFICIENCY VIRUS
RVRQGYSPL

SEQ ID NO: 3795 - protein, 9 aa, HUMAN IMMUNODEFICIENCY VIRUS
SIRLVNGFL

SEQ ID NO: 3796 - protein, 9 aa, HUMAN IMMUNODEFICIENCY VIRUS
SIRLVSGFL

SEQ ID NO: 3797 - protein, 9 aa, HUMAN IMMUNODEFICIENCY VIRUS
RLVNGFLAL

SEQ ID NO: 3798 - protein, 9 aa, HUMAN IMMUNODEFICIENCY VIRUS
RLVSGFLAL

SEQ ID NO: 3799 - protein, 9 aa, HUMAN IMMUNODEFICIENCY VIRUS
FLALAWDDL

SEQ ID NO: 3800 - protein, 9 aa, HUMAN IMMUNODEFICIENCY VIRUS
SYHRLRDFI

SEQ ID NO: 3801 - protein, 9 aa, HUMAN IMMUNODEFICIENCY VIRUS
SYHRLRDLL

SEQ ID NO: 3802 - protein, 9 aa, HUMAN IMMUNODEFICIENCY VIRUS
LIAARTVEL

SEQ ID NO: 3803 - protein, 9 aa, HUMAN IMMUNODEFICIENCY VIRUS
SLKGLRLGW

SEQ ID NO: 3804 - protein, 9 aa, HUMAN IMMUNODEFICIENCY VIRUS
SLRGLQRGW

SEQ ID NO: 3805 - protein, 9 aa, HUMAN IMMUNODEFICIENCY VIRUS
GLRLGWEGL

SEQ ID NO: 3806 - protein, 9 aa, HUMAN IMMUNODEFICIENCY VIRUS
RLGWEGLKY

SEQ ID NO: 3807 - protein, 9 aa, HUMAN IMMUNODEFICIENCY VIRUS
KYWWNLLQY

SEQ ID NO: 3808 - protein, 9 aa, HUMAN IMMUNODEFICIENCY VIRUS
YWWNLLQYW

SEQ ID NO: 3809 - protein, 9 aa, HUMAN IMMUNODEFICIENCY VIRUS
LLQYWSQEL

SEQ ID NO: 3810 - protein, 9 aa, HUMAN IMMUNODEFICIENCY VIRUS
ELKNSAINL

SEQ ID NO: 3811 - protein, 9 aa, HUMAN IMMUNODEFICIENCY VIRUS
ELKNSAISL

SEQ ID NO: 3812 - protein, 9 aa, HUMAN IMMUNODEFICIENCY VIRUS
ELKNSAVSL

SEQ ID NO: 3813 - protein, 9 aa, HUMAN IMMUNODEFICIENCY VIRUS
AVAEGTDRI

SEQ ID NO: 3814 - protein, 9 aa, HUMAN IMMUNODEFICIENCY VIRUS
AILHIPRRI

SEQ ID NO: 3815 - protein, 10 aa, HUMAN IMMUNODEFICIENCY VIRUS
VTVYYGVPVW

SEQ ID NO: 3816 - protein, 10 aa, HUMAN IMMUNODEFICIENCY VIRUS
PVWKEATTTL

SEQ ID NO: 3817 - protein, 10 aa, HUMAN IMMUNODEFICIENCY VIRUS
VWKEATTTLF

SEQ ID NO: 3818 - protein, 10 aa, HUMAN IMMUNODEFICIENCY VIRUS
LFCASDAKAY

SEQ ID NO: 3819 - protein, 10 aa, HUMAN IMMUNODEFICIENCY VIRUS
AYDTEVHNVW

SEQ ID NO: 3820 - protein, 10 aa, HUMAN IMMUNODEFICIENCY VIRUS
MWKNNMVEQM

SEQ ID NO: 3821 - protein, 10 aa, HUMAN IMMUNODEFICIENCY VIRUS
NMVEQMHEDI

SEQ ID NO: 3822 - protein, 10 aa, HUMAN IMMUNODEFICIENCY VIRUS
MVEQMHEDII

SEQ ID NO: 3823 - protein, 10 aa, HUMAN IMMUNODEFICIENCY VIRUS
QMHEDIISLW

SEQ ID NO: 3824 - protein, 10 aa, HUMAN IMMUNODEFICIENCY VIRUS
DIISLWDQSL

SEQ ID NO: 3825 - protein, 10 aa, HUMAN IMMUNODEFICIENCY VIRUS
DVISLWDQSL

SEQ ID NO: 3826 - protein, 10 aa, HUMAN IMMUNODEFICIENCY VIRUS
RLINCNTSAI

SEQ ID NO: 3827 - protein, 10 aa, HUMAN IMMUNODEFICIENCY VIRUS
ITQACPKVSF

SEQ ID NO: 3828 - protein, 10 aa, HUMAN IMMUNODEFICIENCY VIRUS
PIHYCAPAGF

SEQ ID NO: 3829 - protein, 10 aa, HUMAN IMMUNODEFICIENCY VIRUS
PIHYCTPAGF

SEQ ID NO: 3830 - protein, 10 aa, HUMAN IMMUNODEFICIENCY VIRUS
HYCAPAGFAI

SEQ ID NO: 3831 - protein, 10 aa, HUMAN IMMUNODEFICIENCY VIRUS
HYCTPAGFAI

SEQ ID NO: 3832 - protein, 10 aa, HUMAN IMMUNODEFICIENCY VIRUS
AILKCNDKKF

SEQ ID NO: 3833 - protein, 10 aa, HUMAN IMMUNODEFICIENCY VIRUS
GIKPVVSTQL

SEQ ID NO: 3834 - protein, 10 aa, HUMAN IMMUNODEFICIENCY VIRUS
GIRPVVSTQL

SEQ ID NO: 3835 - protein, 10 aa, HUMAN IMMUNODEFICIENCY VIRUS
STQLLLNGSL

SEQ ID NO: 3836 - protein, 10 aa, HUMAN IMMUNODEFICIENCY VIRUS
NTSPRSRVAY

SEQ ID NO: 3837 - protein, 10 aa, HUMAN IMMUNODEFICIENCY VIRUS
SFNCGGEFFY

SEQ ID NO: 3838 - protein, 10 aa, HUMAN IMMUNODEFICIENCY VIRUS
SFNCRGEFFY

SEQ ID NO: 3839 - protein, 10 aa, HUMAN IMMUNODEFICIENCY VIRUS
EFFYCNTSGL

SEQ ID NO: 3840 - protein, 10 aa, HUMAN IMMUNODEFICIENCY VIRUS
FFYCNTSGLF

SEQ ID NO: 3841 - protein, 10 aa, HUMAN IMMUNODEFICIENCY VIRUS
ITLPCRIKQI

SEQ ID NO: 3842 - protein, 10 aa, HUMAN IMMUNODEFICIENCY VIRUS
TLPCRIKQII

SEQ ID NO: 3843 - protein, 10 aa, HUMAN IMMUNODEFICIENCY VIRUS
NMWQEVGKAM

SEQ ID NO: 3844 - protein, 10 aa, HUMAN IMMUNODEFICIENCY VIRUS
MWQEVGKAMY

SEQ ID NO: 3845 - protein, 10 aa, HUMAN IMMUNODEFICIENCY VIRUS
MWQRVGQAMY

SEQ ID NO: 3846 - protein, 10 aa, HUMAN IMMUNODEFICIENCY VIRUS
NTETNKTETF

SEQ ID NO: 3847 - protein, 10 aa, HUMAN IMMUNODEFICIENCY VIRUS
NTTGNTTETF

SEQ ID NO: 3848 - protein, 10 aa, HUMAN IMMUNODEFICIENCY VIRUS
EIFRPGGGDM

SEQ ID NO: 3849 - protein, 10 aa, HUMAN IMMUNODEFICIENCY VIRUS
ETFRPGGGDM

SEQ ID NO: 3850 - protein, 10 aa, HUMAN IMMUNODEFICIENCY VIRUS
DMRDNWRSEL

SEQ ID NO: 3851 - protein, 10 aa, HUMAN IMMUNODEFICIENCY VIRUS
ELYKYKVVEI

SEQ ID NO: 3852 - protein, 10 aa, HUMAN IMMUNODEFICIENCY VIRUS
ELYKYKVVKI

SEQ ID NO: 3853 - protein, 10 aa, HUMAN IMMUNODEFICIENCY VIRUS
KYKVVKIEPL

SEQ ID NO: 3854 - protein, 10 aa, HUMAN IMMUNODEFICIENCY VIRUS
GIGAVFLGFL

SEQ ID NO: 3855 - protein, 10 aa, HUMAN IMMUNODEFICIENCY VIRUS
MLGAMFLGFL

SEQ ID NO: 3856 - protein, 10 aa, HUMAN IMMUNODEFICIENCY VIRUS
TIGAMFLGFL

SEQ ID NO: 3857 - protein, 10 aa, HUMAN IMMUNODEFICIENCY VIRUS
GFLGAAGSTM

SEQ ID NO: 3858 - protein, 10 aa, HUMAN IMMUNODEFICIENCY VIRUS
STMGAASITL

SEQ ID NO: 3859 - protein, 10 aa, HUMAN IMMUNODEFICIENCY VIRUS
ITLTVQARQL

SEQ ID NO: 3860 - protein, 10 aa, HUMAN IMMUNODEFICIENCY VIRUS
TLTVQARQLL

SEQ ID NO: 3861 - protein, 10 aa, HUMAN IMMUNODEFICIENCY VIRUS
GIVQQQNNLL

SEQ ID NO: 3862 - protein, 10 aa, HUMAN IMMUNODEFICIENCY VIRUS
GIVQQQSNLL

SEQ ID NO: 3863 - protein, 10 aa, HUMAN IMMUNODEFICIENCY VIRUS
HLLKLTVWGI

SEQ ID NO: 3864 - protein, 10 aa, HUMAN IMMUNODEFICIENCY VIRUS
HLLQLTVWGI

SEQ ID NO: 3865 - protein, 10 aa, HUMAN IMMUNODEFICIENCY VIRUS
KLTVWGIKQL

SEQ ID NO: 3866 - protein, 10 aa, HUMAN IMMUNODEFICIENCY VIRUS
QLTVWGIKQL

SEQ ID NO: 3867 - protein, 10 aa, HUMAN IMMUNODEFICIENCY VIRUS
GIKQLQARVL

SEQ ID NO: 3868 - protein, 10 aa, HUMAN IMMUNODEFICIENCY VIRUS
YLKDQQLLGI

SEQ ID NO: 3869 - protein, 10 aa, HUMAN IMMUNODEFICIENCY VIRUS
YLRDQQLLGI

SEQ ID NO: 3870 - protein, 10 aa, HUMAN IMMUNODEFICIENCY VIRUS
GIWGCSGKLI

SEQ ID NO: 3871 - protein, 10 aa, HUMAN IMMUNODEFICIENCY VIRUS
KLICTTAVPW

SEQ ID NO: 3872 - protein, 10 aa, HUMAN IMMUNODEFICIENCY VIRUS
KLICTTNVPW

SEQ ID NO: 3873 - protein, 10 aa, HUMAN IMMUNODEFICIENCY VIRUS
KLICTTTVPW

SEQ ID NO: 3874 - protein, 10 aa, HUMAN IMMUNODEFICIENCY VIRUS
TTNVPWNSSW

SEQ ID NO: 3875 - protein, 10 aa, HUMAN IMMUNODEFICIENCY VIRUS
IWNNMTWMEW

SEQ ID NO: 3876 - protein, 10 aa, HUMAN IMMUNODEFICIENCY VIRUS
MTWMEWEREI

SEQ ID NO: 3877 - protein, 10 aa, HUMAN IMMUNODEFICIENCY VIRUS
LLALDKWASL

SEQ ID NO: 3878 - protein, 10 aa, HUMAN IMMUNODEFICIENCY VIRUS
LLELDKWASL

SEQ ID NO: 3879 - protein, 10 aa, HUMAN IMMUNODEFICIENCY VIRUS
WFDITNWLWY

SEQ ID NO: 3880 - protein, 10 aa, HUMAN IMMUNODEFICIENCY VIRUS
ITKWLWYIKI

SEQ ID NO: 3881 - protein, 10 aa, HUMAN IMMUNODEFICIENCY VIRUS
ITNWLWYIKI

SEQ ID NO: 3882 - protein, 10 aa, HUMAN IMMUNODEFICIENCY VIRUS
KWLWYIKIFI

SEQ ID NO: 3883 - protein, 10 aa, HUMAN IMMUNODEFICIENCY VIRUS
NWLWYIKIFI

SEQ ID NO: 3884 - protein, 10 aa, HUMAN IMMUNODEFICIENCY VIRUS
WLWYIKIFIM

SEQ ID NO: 3885 - protein, 10 aa, HUMAN IMMUNODEFICIENCY VIRUS
LWYIKIFIMI

SEQ ID NO: 3886 - protein, 10 aa, HUMAN IMMUNODEFICIENCY VIRUS
KIFIMIVGGL

SEQ ID NO: 3887 - protein, 10 aa, HUMAN IMMUNODEFICIENCY VIRUS
IFIMIVGGLI

SEQ ID NO: 3888 - protein, 10 aa, HUMAN IMMUNODEFICIENCY VIRUS
IMIVGGLIGL

SEQ ID NO: 3889 - protein, 10 aa, HUMAN IMMUNODEFICIENCY VIRUS
IVGGLIGLRI

SEQ ID NO: 3890 - protein, 10 aa, HUMAN IMMUNODEFICIENCY VIRUS
SIVNRVRQGY

SEQ ID NO: 3891 - protein, 10 aa, HUMAN IMMUNODEFICIENCY VIRUS
GYSPLSFQTL

SEQ ID NO: 3892 - protein, 10 aa, HUMAN IMMUNODEFICIENCY VIRUS
LVSGFLALAW

SEQ ID NO: 3893 - protein, 10 aa, HUMAN IMMUNODEFICIENCY VIRUS
GFLALAWDDL

SEQ ID NO: 3894 - protein, 10 aa, HUMAN IMMUNODEFICIENCY VIRUS
ALAWDDLRSL

SEQ ID NO: 3895 - protein, 10 aa, HUMAN IMMUNODEFICIENCY VIRUS
AWDDLRSLCL

SEQ ID NO: 3896 - protein, 10 aa, HUMAN IMMUNODEFICIENCY VIRUS
DLRNLCLFSY

SEQ ID NO: 3897 - protein, 10 aa, HUMAN IMMUNODEFICIENCY VIRUS
DLRSLCLFSY

SEQ ID NO: 3898 - protein, 10 aa, HUMAN IMMUNODEFICIENCY VIRUS
NLCLFSYHRL

SEQ ID NO: 3899 - protein, 10 aa, HUMAN IMMUNODEFICIENCY VIRUS
SLCLFSYHRL

SEQ ID NO: 3900 - protein, 10 aa, HUMAN IMMUNODEFICIENCY VIRUS
LFSYHRLRDF

SEQ ID NO: 3901 - protein, 10 aa, HUMAN IMMUNODEFICIENCY VIRUS
LFSYHRLRDL

SEQ ID NO: 3902 - protein, 10 aa, HUMAN IMMUNODEFICIENCY VIRUS
SYHRLRDFIL

SEQ ID NO: 3903 - protein, 10 aa, HUMAN IMMUNODEFICIENCY VIRUS
SYHRLRDLLL

SEQ ID NO: 3904 - protein, 10 aa, HUMAN IMMUNODEFICIENCY VIRUS
LIAARTVELL

SEQ ID NO: 3905 - protein, 10 aa, HUMAN IMMUNODEFICIENCY VIRUS
IVELLGRRGW

SEQ ID NO: 3906 - protein, 10 aa, HUMAN IMMUNODEFICIENCY VIRUS
LLGRRGWEAL

SEQ ID NO: 3907 - protein, 10 aa, HUMAN IMMUNODEFICIENCY VIRUS
RLGWEGLKYL

SEQ ID NO: 3908 - protein, 10 aa, HUMAN IMMUNODEFICIENCY VIRUS
KYWWNLLQYW

SEQ ID NO: 3909 - protein, 10 aa, HUMAN IMMUNODEFICIENCY VIRUS
NLLQYWSQEL

SEQ ID NO: 3910 - protein, 10 aa, HUMAN IMMUNODEFICIENCY VIRUS
ELKNSAVSLL

SEQ ID NO: 3911 - protein, 10 aa, HUMAN IMMUNODEFICIENCY VIRUS
AVSLLNATAI

SEQ ID NO: 3912 - protein, 10 aa, HUMAN IMMUNODEFICIENCY VIRUS
AVAEGTDRII

SEQ ID NO: 3913 - protein, 10 aa, HUMAN IMMUNODEFICIENCY VIRUS
AVAEGTDRVI

SEQ ID NO: 3914 - protein, 10 aa, HUMAN IMMUNODEFICIENCY VIRUS
HIPRRIRQGL

SEQ ID NO: 3915 - protein, 10 aa, HUMAN IMMUNODEFICIENCY VIRUS
NIPRRIRQGL

SEQ ID NO: 3916 - protein, 10 aa, HUMAN IMMUNODEFICIENCY VIRUS
RIRQGLERAL

SEQ ID NO: 3917 - protein, 11 aa, HUMAN IMMUNODEFICIENCY VIRUS
WVTVYYGVPVW

SEQ ID NO: 3918 - protein, 11 aa, HUMAN IMMUNODEFICIENCY VIRUS
PVWKEATTTLF

SEQ ID NO: 3919 - protein, 11 aa, HUMAN IMMUNODEFICIENCY VIRUS
TLFCASDAKAY

SEQ ID NO: 3920 - protein, 11 aa, HUMAN IMMUNODEFICIENCY VIRUS
CVPTDPNPQEI

SEQ ID NO: 3921 - protein, 11 aa, HUMAN IMMUNODEFICIENCY VIRUS
PTDPNPQEVVL

SEQ ID NO: 3922 - protein, 11 aa, HUMAN IMMUNODEFICIENCY VIRUS
NMWKNNMVEQM

SEQ ID NO: 3923 - protein, 11 aa, HUMAN IMMUNODEFICIENCY VIRUS
NMVEQMHEDII

SEQ ID NO: 3924 - protein, 11 aa, HUMAN IMMUNODEFICIENCY VIRUS
SLKPCVKLTPL

SEQ ID NO: 3925 - protein, 11 aa, HUMAN IMMUNODEFICIENCY VIRUS
CVKLTPLCVTL

SEQ ID NO: 3926 - protein, 11 aa, HUMAN IMMUNODEFICIENCY VIRUS
VITQACPKVSF

SEQ ID NO: 3927 - protein, 11 aa, HUMAN IMMUNODEFICIENCY VIRUS
KVSFEPIPIHY

SEQ ID NO: 3928 - protein, 11 aa, HUMAN IMMUNODEFICIENCY VIRUS
HYCAPAGFAIL

SEQ ID NO: 3929 - protein, 11 aa, HUMAN IMMUNODEFICIENCY VIRUS
NVSTVQCTHGI

SEQ ID NO: 3930 - protein, 11 aa, HUMAN IMMUNODEFICIENCY VIRUS
GIKPVVSTQLL

SEQ ID NO: 3931 - protein, 11 aa, HUMAN IMMUNODEFICIENCY VIRUS
GIRPVVSTQLL

SEQ ID NO: 3932 - protein, 11 aa, HUMAN IMMUNODEFICIENCY VIRUS
FYATGDIIGDI

SEQ ID NO: 3933 - protein, 11 aa, HUMAN IMMUNODEFICIENCY VIRUS
GTAGNSSRAAY

SEQ ID NO: 3934 - protein, 11 aa, HUMAN IMMUNODEFICIENCY VIRUS
TTHSFNCGGEF

SEQ ID NO: 3935 - protein, 11 aa, HUMAN IMMUNODEFICIENCY VIRUS
TTHSFNCRGEF

SEQ ID NO: 3936 - protein, 11 aa, HUMAN IMMUNODEFICIENCY VIRUS
VMHSFNCGGEF

SEQ ID NO: 3937 - protein, 11 aa, HUMAN IMMUNODEFICIENCY VIRUS
EFFYCNTSGLF

SEQ ID NO: 3938 - protein, 11 aa, HUMAN IMMUNODEFICIENCY VIRUS
NITLPCRIKQI

SEQ ID NO: 3939 - protein, 11 aa, HUMAN IMMUNODEFICIENCY VIRUS
TITLPCRIKQI

SEQ ID NO: 3940 - protein, 11 aa, HUMAN IMMUNODEFICIENCY VIRUS
ITLPCRIKQII

SEQ ID NO: 3941 - protein, 11 aa, HUMAN IMMUNODEFICIENCY VIRUS
NMWQEVGKAMY

SEQ ID NO: 3942 - protein, 11 aa, HUMAN IMMUNODEFICIENCY VIRUS
EVGKAMYAPPI

SEQ ID NO: 3943 - protein, 11 aa, HUMAN IMMUNODEFICIENCY VIRUS
RVGQAMYAPPI

SEQ ID NO: 3944 - protein, 11 aa, HUMAN IMMUNODEFICIENCY VIRUS
QIRCSSNITGL

SEQ ID NO: 3945 - protein, 11 aa, HUMAN IMMUNODEFICIENCY VIRUS
DMRDNWRSELY

SEQ ID NO: 3946 - protein, 11 aa, HUMAN IMMUNODEFICIENCY VIRUS
VVEREKRAVGI

SEQ ID NO: 3947 - protein, 11 aa, HUMAN IMMUNODEFICIENCY VIRUS
AVGIGAVFLGF

SEQ ID NO: 3948 - protein, 11 aa, HUMAN IMMUNODEFICIENCY VIRUS
SITLTVQARQL

SEQ ID NO: 3949 - protein, 11 aa, HUMAN IMMUNODEFICIENCY VIRUS
ITLTVQARQLL

SEQ ID NO: 3950 - protein, 11 aa, HUMAN IMMUNODEFICIENCY VIRUS
TVQARQLLSGI

SEQ ID NO: 3951 - protein, 11 aa, HUMAN IMMUNODEFICIENCY VIRUS
LLRAIEAQQHL

SEQ ID NO: 3952 - protein, 11 aa, HUMAN IMMUNODEFICIENCY VIRUS
AIEAQQHLLKL

SEQ ID NO: 3953 - protein, 11 aa, HUMAN IMMUNODEFICIENCY VIRUS
AIEAQQHLLQL

SEQ ID NO: 3954 - protein, 11 aa, HUMAN IMMUNODEFICIENCY VIRUS
AVERYLKDQQL

SEQ ID NO: 3955 - protein, 11 aa, HUMAN IMMUNODEFICIENCY VIRUS
AVERYLRDQQL

SEQ ID NO: 3956 - protein, 11 aa, HUMAN IMMUNODEFICIENCY VIRUS
RYLKDQQLLGI

SEQ ID NO: 3957 - protein, 11 aa, HUMAN IMMUNODEFICIENCY VIRUS
RYLRDQQLLGI

SEQ ID NO: 3958 - protein, 11 aa, HUMAN IMMUNODEFICIENCY VIRUS
YLKDQQLLGIW

SEQ ID NO: 3959 - protein, 11 aa, HUMAN IMMUNODEFICIENCY VIRUS
YLRDQQLLGIW

SEQ ID NO: 3960 - protein, 11 aa, HUMAN IMMUNODEFICIENCY VIRUS
LLGIWGCSGKL

SEQ ID NO: 3961 - protein, 11 aa, HUMAN IMMUNODEFICIENCY VIRUS
CTTNVPWNSSW

SEQ ID NO: 3962 - protein, 11 aa, HUMAN IMMUNODEFICIENCY VIRUS
NMTWMEWEREI

SEQ ID NO: 3963 - protein, 11 aa, HUMAN IMMUNODEFICIENCY VIRUS
WMEWEREIDNY

SEQ ID NO: 3964 - protein, 11 aa, HUMAN IMMUNODEFICIENCY VIRUS
ELLELDKWASL

SEQ ID NO: 3965 - protein, 11 aa, HUMAN IMMUNODEFICIENCY VIRUS
LLALDKWASLW

SEQ ID NO: 3966 - protein, 11 aa, HUMAN IMMUNODEFICIENCY VIRUS
LLELDKWASLW

SEQ ID NO: 3967 - protein, 11 aa, HUMAN IMMUNODEFICIENCY VIRUS
ALDKWASLWNW

SEQ ID NO: 3968 - protein, 11 aa, HUMAN IMMUNODEFICIENCY VIRUS
ELDKWASLWNW

SEQ ID NO: 3969 - protein, 11 aa, HUMAN IMMUNODEFICIENCY VIRUS
KWASLWNWFDI

SEQ ID NO: 3970 - protein, 11 aa, HUMAN IMMUNODEFICIENCY VIRUS
WFDITNWLWYI

SEQ ID NO: 3971 - protein, 11 aa, HUMAN IMMUNODEFICIENCY VIRUS
ITKWLWYIKIF

SEQ ID NO: 3972 - protein, 11 aa, HUMAN IMMUNODEFICIENCY VIRUS
ITNWLWYIKIF

SEQ ID NO: 3973 - protein, 11 aa, HUMAN IMMUNODEFICIENCY VIRUS
KWLWYIKIFIM

SEQ ID NO: 3974 - protein, 11 aa, HUMAN IMMUNODEFICIENCY VIRUS
NWLWYIKIFIM

SEQ ID NO: 3975 - protein, 11 aa, HUMAN IMMUNODEFICIENCY VIRUS
WLWYIKIFIMI

SEQ ID NO: 3976 - protein, 11 aa, HUMAN IMMUNODEFICIENCY VIRUS
KIFIMIVGGLI

SEQ ID NO: 3977 - protein, 11 aa, HUMAN IMMUNODEFICIENCY VIRUS
FIMIVGGLIGL

SEQ ID NO: 3978 - protein, 11 aa, HUMAN IMMUNODEFICIENCY VIRUS
MIVGGLIGLRI

SEQ ID NO: 3979 - protein, 11 aa, HUMAN IMMUNODEFICIENCY VIRUS
IVGGLIGLRII

SEQ ID NO: 3980 - protein, 11 aa, HUMAN IMMUNODEFICIENCY VIRUS
LIGLRIIFAVL

SEQ ID NO: 3981 - protein, 11 aa, HUMAN IMMUNODEFICIENCY VIRUS
LIGLRIVFAVL

SEQ ID NO: 3982 - protein, 11 aa, HUMAN IMMUNODEFICIENCY VIRUS
GLRIIFAVLSI

SEQ ID NO: 3983 - protein, 11 aa, HUMAN IMMUNODEFICIENCY VIRUS
GLRIVFAVLSI

SEQ ID NO: 3984 - protein, 11 aa, HUMAN IMMUNODEFICIENCY VIRUS
RVRQGYSPLSF

SEQ ID NO: 3985 - protein, 11 aa, HUMAN IMMUNODEFICIENCY VIRUS
SIRLVSGFLAL

SEQ ID NO: 3986 - protein, 11 aa, HUMAN IMMUNODEFICIENCY VIRUS
RLVSGFLALAW

SEQ ID NO: 3987 - protein, 11 aa, HUMAN IMMUNODEFICIENCY VIRUS
AWDDLRSLCLF

SEQ ID NO: 3988 - protein, 11 aa, HUMAN IMMUNODEFICIENCY VIRUS
CLFSYHRLRDF

SEQ ID NO: 3989 - protein, 11 aa, HUMAN IMMUNODEFICIENCY VIRUS
CLFSYHRLRDL

SEQ ID NO: 3990 - protein, 11 aa, HUMAN IMMUNODEFICIENCY VIRUS
LFSYHRLRDFI

SEQ ID NO: 3991 - protein, 11 aa, HUMAN IMMUNODEFICIENCY VIRUS
LFSYHRLRDLL

SEQ ID NO: 3992 - protein, 11 aa, HUMAN IMMUNODEFICIENCY VIRUS
SYHRLRDLLLI

SEQ ID NO: 3993 - protein, 11 aa, HUMAN IMMUNODEFICIENCY VIRUS
RIVELLGRRGW

SEQ ID NO: 3994 - protein, 11 aa, HUMAN IMMUNODEFICIENCY VIRUS
ELLGRRGWEAL

SEQ ID NO: 3995 - protein, 11 aa, HUMAN IMMUNODEFICIENCY VIRUS
GLRLGWEGLKY

SEQ ID NO: 3996 - protein, 11 aa, HUMAN IMMUNODEFICIENCY VIRUS
RLGWEGLKYLW

SEQ ID NO: 3997 - protein, 11 aa, HUMAN IMMUNODEFICIENCY VIRUS
YWGQELKNSAI

SEQ ID NO: 3998 - protein, 11 aa, HUMAN IMMUNODEFICIENCY VIRUS
AIAVAEGTDRI

SEQ ID NO: 3999 - protein, 11 aa, HUMAN IMMUNODEFICIENCY VIRUS
RIRQGLERALL

SEQ ID NO: 4000 - protein, 8 aa, HUMAN IMMUNODEFICIENCY VIRUS
SVLSGGEL

SEQ ID NO: 4001 - protein, 8 aa, HUMAN IMMUNODEFICIENCY VIRUS
SVLSGGKL

SEQ ID NO: 4002 - protein, 8 aa, HUMAN IMMUNODEFICIENCY VIRUS
KLDAWEKI

SEQ ID NO: 4003 - protein, 8 aa, HUMAN IMMUNODEFICIENCY VIRUS
KLDKWEKI

SEQ ID NO: 4004 - protein, 8 aa, HUMAN IMMUNODEFICIENCY VIRUS
IVWASREL

SEQ ID NO: 4005 - protein, 8 aa, HUMAN IMMUNODEFICIENCY VIRUS
LVWASREL

SEQ ID NO: 4006 - protein, 8 aa, HUMAN IMMUNODEFICIENCY VIRUS
RFALNPGL

SEQ ID NO: 4007 - protein, 8 aa, HUMAN IMMUNODEFICIENCY VIRUS
RFAVNPGL

SEQ ID NO: 4008 - protein, 8 aa, HUMAN IMMUNODEFICIENCY VIRUS
GTEELRSL

SEQ ID NO: 4009 - protein, 8 aa, HUMAN IMMUNODEFICIENCY VIRUS
LFNTVATL

SEQ ID NO: 4010 - protein, 8 aa, HUMAN IMMUNODEFICIENCY VIRUS
LYNTVATL

SEQ ID NO: 4011 - protein, 8 aa, HUMAN IMMUNODEFICIENCY VIRUS
LYCVHQKI

SEQ ID NO: 4012 - protein, 8 aa, HUMAN IMMUNODEFICIENCY VIRUS
LYCVHQRI

SEQ ID NO: 4013 - protein, 8 aa, HUMAN IMMUNODEFICIENCY VIRUS
KVSQNYPI

SEQ ID NO: 4014 - protein, 8 aa, HUMAN IMMUNODEFICIENCY VIRUS
QVSQNYPI

SEQ ID NO: 4015 - protein, 8 aa, HUMAN IMMUNODEFICIENCY VIRUS
NYPIVQNL

SEQ ID NO: 4016 - protein, 8 aa, HUMAN IMMUNODEFICIENCY VIRUS
KVIEEKAF

SEQ ID NO: 4017 - protein, 8 aa, HUMAN IMMUNODEFICIENCY VIRUS
KVVEEKAF

SEQ ID NO: 4018 - protein, 8 aa, HUMAN IMMUNODEFICIENCY VIRUS
VIPMFSAL

SEQ ID NO: 4019 - protein, 8 aa, HUMAN IMMUNODEFICIENCY VIRUS
VIPMFTAL

SEQ ID NO: 4020 - protein, 8 aa, HUMAN IMMUNODEFICIENCY VIRUS
ATPQDLNM

SEQ ID NO: 4021 - protein, 8 aa, HUMAN IMMUNODEFICIENCY VIRUS
DLNMMLNI

SEQ ID NO: 4022 - protein, 8 aa, HUMAN IMMUNODEFICIENCY VIRUS
TLQEQIAW

SEQ ID NO: 4023 - protein, 8 aa, HUMAN IMMUNODEFICIENCY VIRUS
TLQEQIGW

SEQ ID NO: 4024 - protein, 8 aa, HUMAN IMMUNODEFICIENCY VIRUS
WMTNNPPI

SEQ ID NO: 4025 - protein, 8 aa, HUMAN IMMUNODEFICIENCY VIRUS
WMTSNPPI

SEQ ID NO: 4026 - protein, 8 aa, HUMAN IMMUNODEFICIENCY VIRUS
PIPVGDIY

SEQ ID NO: 4027 - protein, 8 aa, HUMAN IMMUNODEFICIENCY VIRUS
PIPVGEIY

SEQ ID NO: 4028 - protein, 8 aa, HUMAN IMMUNODEFICIENCY VIRUS
DIYKRWII

SEQ ID NO: 4029 - protein, 8 aa, HUMAN IMMUNODEFICIENCY VIRUS
EIYKRWII

SEQ ID NO: 4030 - protein, 8 aa, HUMAN IMMUNODEFICIENCY VIRUS
IYKRWIIL

SEQ ID NO: 4031 - protein, 8 aa, HUMAN IMMUNODEFICIENCY VIRUS
IILGLNKI

SEQ ID NO: 4032 - protein, 8 aa, HUMAN IMMUNODEFICIENCY VIRUS
GLNKIVRM

SEQ ID NO: 4033 - protein, 8 aa, HUMAN IMMUNODEFICIENCY VIRUS
RMYSPTSI

SEQ ID NO: 4034 - protein, 8 aa, HUMAN IMMUNODEFICIENCY VIRUS
RMYSPVSI

SEQ ID NO: 4035 - protein, 8 aa, HUMAN IMMUNODEFICIENCY VIRUS
MYSPTSIL

SEQ ID NO: 4036 - protein, 8 aa, HUMAN IMMUNODEFICIENCY VIRUS
MYSPVSIL

SEQ ID NO: 4037 - protein, 8 aa, HUMAN IMMUNODEFICIENCY VIRUS
ATQDVKNW

SEQ ID NO: 4038 - protein, 8 aa, HUMAN IMMUNODEFICIENCY VIRUS
ATQEVKNW

SEQ ID NO: 4039 - protein, 8 aa, HUMAN IMMUNODEFICIENCY VIRUS
NWMTDTLL

SEQ ID NO: 4040 - protein, 8 aa, HUMAN IMMUNODEFICIENCY VIRUS
NWMTETLL

SEQ ID NO: 4041 - protein, 8 aa, HUMAN IMMUNODEFICIENCY VIRUS
ALGPAATL

SEQ ID NO: 4042 - protein, 8 aa, HUMAN IMMUNODEFICIENCY VIRUS
ALGPGATL

SEQ ID NO: 4043 - protein, 8 aa, HUMAN IMMUNODEFICIENCY VIRUS
IMMQKSNF

SEQ ID NO: 4044 - protein, 8 aa, HUMAN IMMUNODEFICIENCY VIRUS
IMMQRGNF

SEQ ID NO: 4045 - protein, 8 aa, HUMAN IMMUNODEFICIENCY VIRUS
CTERQANF

SEQ ID NO: 4046 - protein, 8 aa, HUMAN IMMUNODEFICIENCY VIRUS
ETIDKDLY

SEQ ID NO: 4047 - protein, 8 aa, HUMAN IMMUNODEFICIENCY VIRUS
ELYPLASL

SEQ ID NO: 4048 - protein, 8 aa, HUMAN IMMUNODEFICIENCY VIRUS
ELYPLTSL

SEQ ID NO: 4049 - protein, 8 aa, HUMAN IMMUNODEFICIENCY VIRUS
PLASLKSL

SEQ ID NO: 4050 - protein, 8 aa, HUMAN IMMUNODEFICIENCY VIRUS
PLTSLKSL

SEQ ID NO: 4051 - protein, 8 aa, HUMAN IMMUNODEFICIENCY VIRUS
PLTSLRSL

SEQ ID NO: 4052 - protein, 8 aa, HUMAN IMMUNODEFICIENCY VIRUS
LTSLKSLF

SEQ ID NO: 4053 - protein, 8 aa, HUMAN IMMUNODEFICIENCY VIRUS
LTSLRSLF

SEQ ID NO: 4054 - protein, 8 aa, HUMAN IMMUNODEFICIENCY VIRUS
SLFGNDPL

SEQ ID NO: 4055 - protein, 8 aa, HUMAN IMMUNODEFICIENCY VIRUS
SLFGSDPL

SEQ ID NO: 4056 - protein, 9 aa, HUMAN IMMUNODEFICIENCY VIRUS
KYKLKHIVW

SEQ ID NO: 4057 - protein, 9 aa, HUMAN IMMUNODEFICIENCY VIRUS
KYRLKHLVW

SEQ ID NO: 4058 - protein, 9 aa, HUMAN IMMUNODEFICIENCY VIRUS
HIVWASREL

SEQ ID NO: 4059 - protein, 9 aa, HUMAN IMMUNODEFICIENCY VIRUS
HLVWASREL

SEQ ID NO: 4060 - protein, 9 aa, HUMAN IMMUNODEFICIENCY VIRUS
RFALNPGLL

SEQ ID NO: 4061 - protein, 9 aa, HUMAN IMMUNODEFICIENCY VIRUS
RFAVNPGLL

SEQ ID NO: 4062 - protein, 9 aa, HUMAN IMMUNODEFICIENCY VIRUS
ETSEGCRQI

SEQ ID NO: 4063 - protein, 9 aa, HUMAN IMMUNODEFICIENCY VIRUS
ILGQLQPSL

SEQ ID NO: 4064 - protein, 9 aa, HUMAN IMMUNODEFICIENCY VIRUS
SLQTGSEEL

SEQ ID NO: 4065 - protein, 9 aa, HUMAN IMMUNODEFICIENCY VIRUS
SLFNTVATL

SEQ ID NO: 4066 - protein, 9 aa, HUMAN IMMUNODEFICIENCY VIRUS
SLYNTVATL

SEQ ID NO: 4067 - protein, 9 aa, HUMAN IMMUNODEFICIENCY VIRUS
LFNTVATLY

SEQ ID NO: 4068 - protein, 9 aa, HUMAN IMMUNODEFICIENCY VIRUS
LYNTVATLY

SEQ ID NO: 4069 - protein, 9 aa, HUMAN IMMUNODEFICIENCY VIRUS
TLYCVHQKI

SEQ ID NO: 4070 - protein, 9 aa, HUMAN IMMUNODEFICIENCY VIRUS
TLYCVHQRI

SEQ ID NO: 4071 - protein, 9 aa, HUMAN IMMUNODEFICIENCY VIRUS
DVKDTKEAL

SEQ ID NO: 4072 - protein, 9 aa, HUMAN IMMUNODEFICIENCY VIRUS
EVKDTKEAL

SEQ ID NO: 4073 - protein, 9 aa, HUMAN IMMUNODEFICIENCY VIRUS
DTKEALDKI

SEQ ID NO: 4074 - protein, 9 aa, HUMAN IMMUNODEFICIENCY VIRUS
DTKEALEKI

SEQ ID NO: 4075 - protein, 9 aa, HUMAN IMMUNODEFICIENCY VIRUS
IVQNAQGQM

SEQ ID NO: 4076 - protein, 9 aa, HUMAN IMMUNODEFICIENCY VIRUS
IVQNLQGQM

SEQ ID NO: 4077 - protein, 9 aa, HUMAN IMMUNODEFICIENCY VIRUS
TLNAWVKVI

SEQ ID NO: 4078 - protein, 9 aa, HUMAN IMMUNODEFICIENCY VIRUS
AFSPEVIPM

SEQ ID NO: 4079 - protein, 9 aa, HUMAN IMMUNODEFICIENCY VIRUS
EVIPMFSAL

SEQ ID NO: 4080 - protein, 9 aa, HUMAN IMMUNODEFICIENCY VIRUS
EVIPMFTAL

SEQ ID NO: 4081 - protein, 9 aa, HUMAN IMMUNODEFICIENCY VIRUS
ATPQDLNMM

SEQ ID NO: 4082 - protein, 9 aa, HUMAN IMMUNODEFICIENCY VIRUS
ATPQDLNTM

SEQ ID NO: 4083 - protein, 9 aa, HUMAN IMMUNODEFICIENCY VIRUS
IVGGHQAAM

SEQ ID NO: 4084 - protein, 9 aa, HUMAN IMMUNODEFICIENCY VIRUS
TVGGHQAAM

SEQ ID NO: 4085 - protein, 9 aa, HUMAN IMMUNODEFICIENCY VIRUS
AMQMLKDTI

SEQ ID NO: 4086 - protein, 9 aa, HUMAN IMMUNODEFICIENCY VIRUS
AMQMLKETI

SEQ ID NO: 4087 - protein, 9 aa, HUMAN IMMUNODEFICIENCY VIRUS
TINEEAAEW

SEQ ID NO: 4088 - protein, 9 aa, HUMAN IMMUNODEFICIENCY VIRUS
DIAGTTSTL

SEQ ID NO: 4089 - protein, 9 aa, HUMAN IMMUNODEFICIENCY VIRUS
TTSTLQEQI

SEQ ID NO: 4090 - protein, 9 aa, HUMAN IMMUNODEFICIENCY VIRUS
STLQEQIAW

SEQ ID NO: 4091 - protein, 9 aa, HUMAN IMMUNODEFICIENCY VIRUS
STLQEQIGW

SEQ ID NO: 4092 - protein, 9 aa, HUMAN IMMUNODEFICIENCY VIRUS
TLQEQIAWM

SEQ ID NO: 4093 - protein, 9 aa, HUMAN IMMUNODEFICIENCY VIRUS
TLQEQIGWM

SEQ ID NO: 4094 - protein, 9 aa, HUMAN IMMUNODEFICIENCY VIRUS
GWMTNNPPI

SEQ ID NO: 4095 - protein, 9 aa, HUMAN IMMUNODEFICIENCY VIRUS
GWMTSNPPI

SEQ ID NO: 4096 - protein, 9 aa, HUMAN IMMUNODEFICIENCY VIRUS
PVGDIYKRW

SEQ ID NO: 4097 - protein, 9 aa, HUMAN IMMUNODEFICIENCY VIRUS
PVGEIYKRW

SEQ ID NO: 4098 - protein, 9 aa, HUMAN IMMUNODEFICIENCY VIRUS
DIYKRWIIL

SEQ ID NO: 4099 - protein, 9 aa, HUMAN IMMUNODEFICIENCY VIRUS
EIYKRWIIL

SEQ ID NO: 4100 - protein, 9 aa, HUMAN IMMUNODEFICIENCY VIRUS
WIILGLNKI

SEQ ID NO: 4101 - protein, 9 aa, HUMAN IMMUNODEFICIENCY VIRUS
GLNKIVRMY

SEQ ID NO: 4102 - protein, 9 aa, HUMAN IMMUNODEFICIENCY VIRUS
RMYSPTSIL

SEQ ID NO: 4103 - protein, 9 aa, HUMAN IMMUNODEFICIENCY VIRUS
RMYSPVSIL

SEQ ID NO: 4104 - protein, 9 aa, HUMAN IMMUNODEFICIENCY VIRUS
PFRDYVDRF

SEQ ID NO: 4105 - protein, 9 aa, HUMAN IMMUNODEFICIENCY VIRUS
YVDRFFKTL

SEQ ID NO: 4106 - protein, 9 aa, HUMAN IMMUNODEFICIENCY VIRUS
YVDRFYKTL

SEQ ID NO: 4107 - protein, 9 aa, HUMAN IMMUNODEFICIENCY VIRUS
ATQDVKNWM

SEQ ID NO: 4108 - protein, 9 aa, HUMAN IMMUNODEFICIENCY VIRUS
ATQEVKNWM

SEQ ID NO: 4109 - protein, 9 aa, HUMAN IMMUNODEFICIENCY VIRUS
NIMMQRGNF

SEQ ID NO: 4110 - protein, 9 aa, HUMAN IMMUNODEFICIENCY VIRUS
TIMMQRGNF

SEQ ID NO: 4111 - protein, 9 aa, HUMAN IMMUNODEFICIENCY VIRUS
CTERQANFL

SEQ ID NO: 4112 - protein, 9 aa, HUMAN IMMUNODEFICIENCY VIRUS
PTAPPAESF

SEQ ID NO: 4113 - protein, 9 aa, HUMAN IMMUNODEFICIENCY VIRUS
PTAPPEESF

SEQ ID NO: 4114 - protein, 9 aa, HUMAN IMMUNODEFICIENCY VIRUS
PTAPPAESF

SEQ ID NO: 4115 - protein, 9 aa, HUMAN IMMUNODEFICIENCY VIRUS
PTAPPPESF

SEQ ID NO: 4116 - protein, 9 aa, HUMAN IMMUNODEFICIENCY VIRUS
PIDKELYPL

SEQ ID NO: 4117 - protein, 9 aa, HUMAN IMMUNODEFICIENCY VIRUS
PIDKELYPL

SEQ ID NO: 4118 - protein, 9 aa, HUMAN IMMUNODEFICIENCY VIRUS
TIDKDLYPL

SEQ ID NO: 4119 - protein, 9 aa, HUMAN IMMUNODEFICIENCY VIRUS
PLASLKSLF

SEQ ID NO: 4120 - protein, 9 aa, HUMAN IMMUNODEFICIENCY VIRUS
PLTSLKSLF

SEQ ID NO: 4121 - protein, 9 aa, HUMAN IMMUNODEFICIENCY VIRUS
PLTSLRSLF

SEQ ID NO: 4122 - protein, 10 aa, HUMAN IMMUNODEFICIENCY VIRUS
VLSGGKLDAW

SEQ ID NO: 4123 - protein, 10 aa, HUMAN IMMUNODEFICIENCY VIRUS
KLDAWEKIRL

SEQ ID NO: 4124 - protein, 10 aa, HUMAN IMMUNODEFICIENCY VIRUS
KLDKWEKIRL

SEQ ID NO: 4125 - protein, 10 aa, HUMAN IMMUNODEFICIENCY VIRUS
RLRPGGKKKY

SEQ ID NO: 4126 - protein, 10 aa, HUMAN IMMUNODEFICIENCY VIRUS
VWASRELERF

SEQ ID NO: 4127 - protein, 10 aa, HUMAN IMMUNODEFICIENCY VIRUS
ETSEGCRQIL

SEQ ID NO: 4128 - protein, 10 aa, HUMAN IMMUNODEFICIENCY VIRUS
QILGQLQPSL

SEQ ID NO: 4129 - protein, 10 aa, HUMAN IMMUNODEFICIENCY VIRUS
QTGSEELRSL

SEQ ID NO: 4130 - protein, 10 aa, HUMAN IMMUNODEFICIENCY VIRUS
SLFNTVATLY

SEQ ID NO: 4131 - protein, 10 aa, HUMAN IMMUNODEFICIENCY VIRUS
SLYNTVATLY

SEQ ID NO: 4132 - protein, 10 aa, HUMAN IMMUNODEFICIENCY VIRUS
ATLYCVHQKI

SEQ ID NO: 4133 - protein, 10 aa, HUMAN IMMUNODEFICIENCY VIRUS
ATLYCVHQRI

SEQ ID NO: 4134 - protein, 10 aa, HUMAN IMMUNODEFICIENCY VIRUS
PIVQNAQGQM

SEQ ID NO: 4135 - protein, 10 aa, HUMAN IMMUNODEFICIENCY VIRUS
PIVQNLQGQM

SEQ ID NO: 4136 - protein, 10 aa, HUMAN IMMUNODEFICIENCY VIRUS
AISPRTLNAW

SEQ ID NO: 4137 - protein, 10 aa, HUMAN IMMUNODEFICIENCY VIRUS
ALSPRTLNAW

SEQ ID NO: 4138 - protein, 10 aa, HUMAN IMMUNODEFICIENCY VIRUS
RTLNAWVKVI

SEQ ID NO: 4139 - protein, 10 aa, HUMAN IMMUNODEFICIENCY VIRUS
WVKVIEEKAF

SEQ ID NO: 4140 - protein, 10 aa, HUMAN IMMUNODEFICIENCY VIRUS
WVKVVEEKAF

SEQ ID NO: 4141 - protein, 10 aa, HUMAN IMMUNODEFICIENCY VIRUS
AFSPEVIPMF

SEQ ID NO: 4142 - protein, 10 aa, HUMAN IMMUNODEFICIENCY VIRUS
ATPQDLNMML

SEQ ID NO: 4143 - protein, 10 aa, HUMAN IMMUNODEFICIENCY VIRUS
ATPQDLNTML

SEQ ID NO: 4144 - protein, 10 aa, HUMAN IMMUNODEFICIENCY VIRUS
NIVGGHQAAM

SEQ ID NO: 4145 - protein, 10 aa, HUMAN IMMUNODEFICIENCY VIRUS
NTVGGHQAAM

SEQ ID NO: 4146 - protein, 10 aa, HUMAN IMMUNODEFICIENCY VIRUS
DTINEEAAEW

SEQ ID NO: 4147 - protein, 10 aa, HUMAN IMMUNODEFICIENCY VIRUS
ETINEEAAEW

SEQ ID NO: 4148 - protein, 10 aa, HUMAN IMMUNODEFICIENCY VIRUS
RLHPVHAGPI

SEQ ID NO: 4149 - protein, 10 aa, HUMAN IMMUNODEFICIENCY VIRUS
RVHPVHAGPI

SEQ ID NO: 4150 - protein, 10 aa, HUMAN IMMUNODEFICIENCY VIRUS
QMREPRGSDI

SEQ ID NO: 4151 - protein, 10 aa, HUMAN IMMUNODEFICIENCY VIRUS
GTTSTLQEQI

SEQ ID NO: 4152 - protein, 10 aa, HUMAN IMMUNODEFICIENCY VIRUS
STLQEQIAWM

SEQ ID NO: 4153 - protein, 10 aa, HUMAN IMMUNODEFICIENCY VIRUS
STLQEQIGWM

SEQ ID NO: 4154 - protein, 10 aa, HUMAN IMMUNODEFICIENCY VIRUS
PVGDIYKRWI

SEQ ID NO: 4155 - protein, 10 aa, HUMAN IMMUNODEFICIENCY VIRUS
PVGEIYKRWI

SEQ ID NO: 4156 - protein, 10 aa, HUMAN IMMUNODEFICIENCY VIRUS
IYKRWIILGL

SEQ ID NO: 4157 - protein, 10 aa, HUMAN IMMUNODEFICIENCY VIRUS
RWIILGLNKI

SEQ ID NO: 4158 - protein, 10 aa, HUMAN IMMUNODEFICIENCY VIRUS
ILGLNKIVRM

SEQ ID NO: 4159 - protein, 10 aa, HUMAN IMMUNODEFICIENCY VIRUS
IVRMYSPTSI

SEQ ID NO: 4160 - protein, 10 aa, HUMAN IMMUNODEFICIENCY VIRUS
IVRMYSPVSI

SEQ ID NO: 4161 - protein, 10 aa, HUMAN IMMUNODEFICIENCY VIRUS
MYSPTSILDI

SEQ ID NO: 4162 - protein, 10 aa, HUMAN IMMUNODEFICIENCY VIRUS
MYSPVSILDI

SEQ ID NO: 4163 - protein, 10 aa, HUMAN IMMUNODEFICIENCY VIRUS
DIKQGPKEPF

SEQ ID NO: 4164 - protein, 10 aa, HUMAN IMMUNODEFICIENCY VIRUS
DIRQGPKEPF

SEQ ID NO: 4165 - protein, 10 aa, HUMAN IMMUNODEFICIENCY VIRUS
PFRDYVDRFF

SEQ ID NO: 4166 - protein, 10 aa, HUMAN IMMUNODEFICIENCY VIRUS
PFRDYVDRFY

SEQ ID NO: 4167 - protein, 10 aa, HUMAN IMMUNODEFICIENCY VIRUS
DYVDRFFKTL

SEQ ID NO: 4168 - protein, 10 aa, HUMAN IMMUNODEFICIENCY VIRUS
DYVDRFYKTL

SEQ ID NO: 4169 - protein, 10 aa, HUMAN IMMUNODEFICIENCY VIRUS
DVKNWMTDTL

SEQ ID NO: 4170 - protein, 10 aa, HUMAN IMMUNODEFICIENCY VIRUS
DVKNWMTETL

SEQ ID NO: 4171 - protein, 10 aa, HUMAN IMMUNODEFICIENCY VIRUS
EVKNWMTETL

SEQ ID NO: 4172 - protein, 10 aa, HUMAN IMMUNODEFICIENCY VIRUS
ATIMMQRGNF

SEQ ID NO: 4173 - protein, 10 aa, HUMAN IMMUNODEFICIENCY VIRUS
CFNCGKEGHI

SEQ ID NO: 4174 - protein, 10 aa, HUMAN IMMUNODEFICIENCY VIRUS
CFNCGKEGHL

SEQ ID NO: 4175 - protein, 10 aa, HUMAN IMMUNODEFICIENCY VIRUS
TTPSQKQEPI

SEQ ID NO: 4176 - protein, 10 aa, HUMAN IMMUNODEFICIENCY VIRUS
ETIDKDLYPL

SEQ ID NO: 4177 - protein, 10 aa, HUMAN IMMUNODEFICIENCY VIRUS
RTENSLYPPL

SEQ ID NO: 4178 - protein, 10 aa, HUMAN IMMUNODEFICIENCY VIRUS
LYPLASLKSL

SEQ ID NO: 4179 - protein, 11 aa, HUMAN IMMUNODEFICIENCY VIRUS
SVLSGGKLDAW

SEQ ID NO: 4180 - protein, 11 aa, HUMAN IMMUNODEFICIENCY VIRUS
IVWASRELERF

SEQ ID NO: 4181 - protein, 11 aa, HUMAN IMMUNODEFICIENCY VIRUS
LVWASRELERF

SEQ ID NO: 4182 - protein, 11 aa, HUMAN IMMUNODEFICIENCY VIRUS
ELERFALNPGL

SEQ ID NO: 4183 - protein, 11 aa, HUMAN IMMUNODEFICIENCY VIRUS
ELERFAVNPGL

SEQ ID NO: 4184 - protein, 11 aa, HUMAN IMMUNODEFICIENCY VIRUS
LLETSEGCRQI

SEQ ID NO: 4185 - protein, 11 aa, HUMAN IMMUNODEFICIENCY VIRUS
RIEVKDTKEAL

SEQ ID NO: 4186 - protein, 11 aa, HUMAN IMMUNODEFICIENCY VIRUS
NLQGQMVHQAI

SEQ ID NO: 4187 - protein, 11 aa, HUMAN IMMUNODEFICIENCY VIRUS
MVHQAISPRTL

SEQ ID NO: 4188 - protein, 11 aa, HUMAN IMMUNODEFICIENCY VIRUS
AWVKVIEEKAF

SEQ ID NO: 4189 - protein, 11 aa, HUMAN IMMUNODEFICIENCY VIRUS
AWVKVVEEKAF

SEQ ID NO: 4190 - protein, 11 aa, HUMAN IMMUNODEFICIENCY VIRUS
ALSEGATPQDL

SEQ ID NO: 4191 - protein, 11 aa, HUMAN IMMUNODEFICIENCY VIRUS
IVGGHQAAMQM

SEQ ID NO: 4192 - protein, 11 aa, HUMAN IMMUNODEFICIENCY VIRUS
TVGGHQAAMQM

SEQ ID NO: 4193 - protein, 11 aa, HUMAN IMMUNODEFICIENCY VIRUS
TTSTLQEQIAW

SEQ ID NO: 4194 - protein, 11 aa, HUMAN IMMUNODEFICIENCY VIRUS
TTSTLQEQIGW

SEQ ID NO: 4195 - protein, 11 aa, HUMAN IMMUNODEFICIENCY VIRUS
QIGWMTNNPPI

SEQ ID NO: 4196 - protein, 11 aa, HUMAN IMMUNODEFICIENCY VIRUS
QIGWMTSNPPI

SEQ ID NO: 4197 - protein, 11 aa, HUMAN IMMUNODEFICIENCY VIRUS
PIPVGEIYKRW

SEQ ID NO: 4198 - protein, 11 aa, HUMAN IMMUNODEFICIENCY VIRUS
PVGDIYKRWII

SEQ ID NO: 4199 - protein, 11 aa, HUMAN IMMUNODEFICIENCY VIRUS
PVGEIYKRWII

SEQ ID NO: 4200 - protein, 11 aa, HUMAN IMMUNODEFICIENCY VIRUS
DIYKRWIILGL

SEQ ID NO: 4201 - protein, 11 aa, HUMAN IMMUNODEFICIENCY VIRUS
EIYKRWIILGL

SEQ ID NO: 4202 - protein, 11 aa, HUMAN IMMUNODEFICIENCY VIRUS
IILGLNKIVRM

SEQ ID NO: 4203 - protein, 11 aa, HUMAN IMMUNODEFICIENCY VIRUS
ILGLNKIVRMY

SEQ ID NO: 4204 - protein, 11 aa, HUMAN IMMUNODEFICIENCY VIRUS
KIVRMYSPTSI

SEQ ID NO: 4205 - protein, 11 aa, HUMAN IMMUNODEFICIENCY VIRUS
KIVRMYSPVSI

SEQ ID NO: 4206 - protein, 11 aa, HUMAN IMMUNODEFICIENCY VIRUS
IVRMYSPTSIL

SEQ ID NO: 4207 - protein, 11 aa, HUMAN IMMUNODEFICIENCY VIRUS
IVRMYSPVSIL

SEQ ID NO: 4208 - protein, 11 aa, HUMAN IMMUNODEFICIENCY VIRUS
RMYSPTSILDI

SEQ ID NO: 4209 - protein, 11 aa, HUMAN IMMUNODEFICIENCY VIRUS
RMYSPVSILDI

SEQ ID NO: 4210 - protein, 11 aa, HUMAN IMMUNODEFICIENCY VIRUS
DVKNWMTDTLL

SEQ ID NO: 4211 - protein, 11 aa, HUMAN IMMUNODEFICIENCY VIRUS
DVKNWMTETLL

SEQ ID NO: 4212 - protein, 11 aa, HUMAN IMMUNODEFICIENCY VIRUS
EVKNWMTETLL

SEQ ID NO: 4213 - protein, 11 aa, HUMAN IMMUNODEFICIENCY VIRUS
ILKALGPAATL

SEQ ID NO: 4214 - protein, 11 aa, HUMAN IMMUNODEFICIENCY VIRUS
ALGPAATLEEM

SEQ ID NO: 4215 - protein, 11 aa, HUMAN IMMUNODEFICIENCY VIRUS
ALGPGATLEEM

SEQ ID NO: 4216 - protein, 11 aa, HUMAN IMMUNODEFICIENCY VIRUS
ATAQQDLKGGY

SEQ ID NO: 4217 - protein, 11 aa, HUMAN IMMUNODEFICIENCY VIRUS
CWKCGKEGHQM

SEQ ID NO: 4218 - protein, 11 aa, HUMAN IMMUNODEFICIENCY VIRUS
PTAPPAESFGF

SEQ ID NO: 4219 - protein, 11 aa, HUMAN IMMUNODEFICIENCY VIRUS
PTAPPEESFRF

SEQ ID NO: 4220 - protein, 11 aa, HUMAN IMMUNODEFICIENCY VIRUS
PTAPPAESFRF

SEQ ID NO: 4221 - protein, 11 aa, HUMAN IMMUNODEFICIENCY VIRUS
PTAPPPESFRF

SEQ ID NO: 4222 - protein, 11 aa, HUMAN IMMUNODEFICIENCY VIRUS
LYPLASLKSLF

SEQ ID NO: 4223 - protein, 11 aa, HUMAN IMMUNODEFICIENCY VIRUS
SLKSLFGNDPL

SEQ ID NO: 4224 - protein, 8 aa, HUMAN IMMUNODEFICIENCY VIRUS
DLEKHGAI

SEQ ID NO: 4225 - protein, 8 aa, HUMAN IMMUNODEFICIENCY VIRUS
ATNADCAW

SEQ ID NO: 4226 - protein, 8 aa, HUMAN IMMUNODEFICIENCY VIRUS
PVRPQVPL

SEQ ID NO: 4227 - protein, 8 aa, HUMAN IMMUNODEFICIENCY VIRUS
PMTYKGAF

SEQ ID NO: 4228 - protein, 8 aa, HUMAN IMMUNODEFICIENCY VIRUS
TYKGAFDL

SEQ ID NO: 4229 - protein, 8 aa, HUMAN IMMUNODEFICIENCY VIRUS
AFDLSFFL

SEQ ID NO: 4230 - protein, 8 aa, HUMAN IMMUNODEFICIENCY VIRUS
ALDLSHFL

SEQ ID NO: 4231 - protein, 8 aa, HUMAN IMMUNODEFICIENCY VIRUS
AVDLSHFL

SEQ ID NO: 4232 - protein, 8 aa, HUMAN IMMUNODEFICIENCY VIRUS
FLKEKGGL

SEQ ID NO: 4233 - protein, 8 aa, HUMAN IMMUNODEFICIENCY VIRUS
DILDLWVY

SEQ ID NO: 4234 - protein, 8 aa, HUMAN IMMUNODEFICIENCY VIRUS
EILDLWVY

SEQ ID NO: 4235 - protein, 8 aa, HUMAN IMMUNODEFICIENCY VIRUS
WVYHTQGF

SEQ ID NO: 4236 - protein, 8 aa, HUMAN IMMUNODEFICIENCY VIRUS
WVYHTQGY

SEQ ID NO: 4237 - protein, 8 aa, HUMAN IMMUNODEFICIENCY VIRUS
VYHTQGFF

SEQ ID NO: 4238 - protein, 8 aa, HUMAN IMMUNODEFICIENCY VIRUS
VYHTQGYF

SEQ ID NO: 4239 - protein, 8 aa, HUMAN IMMUNODEFICIENCY VIRUS
FFPDWQNY

SEQ ID NO: 4240 - protein, 8 aa, HUMAN IMMUNODEFICIENCY VIRUS
YFPDWQNY

SEQ ID NO: 4241 - protein, 8 aa, HUMAN IMMUNODEFICIENCY VIRUS
NYTPGPGI

SEQ ID NO: 4242 - protein, 8 aa, HUMAN IMMUNODEFICIENCY VIRUS
GIRYPLTF

SEQ ID NO: 4243 - protein, 8 aa, HUMAN IMMUNODEFICIENCY VIRUS
GTRFPLTF

SEQ ID NO: 4244 - protein, 8 aa, HUMAN IMMUNODEFICIENCY VIRUS
RFPLTFGW

SEQ ID NO: 4245 - protein, 8 aa, HUMAN IMMUNODEFICIENCY VIRUS
RYPLTFGW

SEQ ID NO: 4246 - protein, 8 aa, HUMAN IMMUNODEFICIENCY VIRUS
PLTFGWCF

SEQ ID NO: 4247 - protein, 8 aa, HUMAN IMMUNODEFICIENCY VIRUS
TFGWCFKL

SEQ ID NO: 4248 - protein, 9 aa, HUMAN IMMUNODEFICIENCY VIRUS
GVGAASQDL

SEQ ID NO: 4249 - protein, 9 aa, HUMAN IMMUNODEFICIENCY VIRUS
GVGAVSQDL

SEQ ID NO: 4250 - protein, 9 aa, HUMAN IMMUNODEFICIENCY VIRUS
GVGAVSRDL

SEQ ID NO: 4251 - protein, 9 aa, HUMAN IMMUNODEFICIENCY VIRUS
ATNADCAWL

SEQ ID NO: 4252 - protein, 9 aa, HUMAN IMMUNODEFICIENCY VIRUS
QVPLRPMTF

SEQ ID NO: 4253 - protein, 9 aa, HUMAN IMMUNODEFICIENCY VIRUS
QVPLRPMTY

SEQ ID NO: 4254 - protein, 9 aa, HUMAN IMMUNODEFICIENCY VIRUS
MTYKGAFDL

SEQ ID NO: 4255 - protein, 9 aa, HUMAN IMMUNODEFICIENCY VIRUS
FFLKEKGGL

SEQ ID NO: 4256 - protein, 9 aa, HUMAN IMMUNODEFICIENCY VIRUS
HFLKEKGGL

SEQ ID NO: 4257 - protein, 9 aa, HUMAN IMMUNODEFICIENCY VIRUS
IYSKKRQEI

SEQ ID NO: 4258 - protein, 9 aa, HUMAN IMMUNODEFICIENCY VIRUS
LWVYHTQGF

SEQ ID NO: 4259 - protein, 9 aa, HUMAN IMMUNODEFICIENCY VIRUS
LWVYHTQGY

SEQ ID NO: 4260 - protein, 9 aa, HUMAN IMMUNODEFICIENCY VIRUS
WVYHTQGFF

SEQ ID NO: 4261 - protein, 9 aa, HUMAN IMMUNODEFICIENCY VIRUS
WVYHTQGYF

SEQ ID NO: 4262 - protein, 9 aa, HUMAN IMMUNODEFICIENCY VIRUS
HTQGFFPDW

SEQ ID NO: 4263 - protein, 9 aa, HUMAN IMMUNODEFICIENCY VIRUS
HTQGYFPDW

SEQ ID NO: 4264 - protein, 9 aa, HUMAN IMMUNODEFICIENCY VIRUS
NTQGYFPDW

SEQ ID NO: 4265 - protein, 9 aa, HUMAN IMMUNODEFICIENCY VIRUS
GFFPDWQNY

SEQ ID NO: 4266 - protein, 9 aa, HUMAN IMMUNODEFICIENCY VIRUS
GYFPDWQNY

SEQ ID NO: 4267 - protein, 9 aa, HUMAN IMMUNODEFICIENCY VIRUS
YTPGPGIRY

SEQ ID NO: 4268 - protein, 9 aa, HUMAN IMMUNODEFICIENCY VIRUS
YTPGPGTRF

SEQ ID NO: 4269 - protein, 9 aa, HUMAN IMMUNODEFICIENCY VIRUS
LTFGWCFKL

SEQ ID NO: 4270 - protein, 10 aa, HUMAN IMMUNODEFICIENCY VIRUS
KWSKSSIVGW

SEQ ID NO: 4271 - protein, 10 aa, HUMAN IMMUNODEFICIENCY VIRUS
GFPVRPQVPL

SEQ ID NO: 4272 - protein, 10 aa, HUMAN IMMUNODEFICIENCY VIRUS
PMTYKGAFDL

SEQ ID NO: 4273 - protein, 10 aa, HUMAN IMMUNODEFICIENCY VIRUS
SFFLKEKGGL

SEQ ID NO: 4274 - protein, 10 aa, HUMAN IMMUNODEFICIENCY VIRUS
LIYSKKRQEI

SEQ ID NO: 4275 - protein, 10 aa, HUMAN IMMUNODEFICIENCY VIRUS
IYSKKRQEIL

SEQ ID NO: 4276 - protein, 10 aa, HUMAN IMMUNODEFICIENCY VIRUS
DLWVYHTQGF

SEQ ID NO: 4277 - protein, 10 aa, HUMAN IMMUNODEFICIENCY VIRUS
DLWVYHTQGY

SEQ ID NO: 4278 - protein, 10 aa, HUMAN IMMUNODEFICIENCY VIRUS
LWVYHTQGFF

SEQ ID NO: 4279 - protein, 10 aa, HUMAN IMMUNODEFICIENCY VIRUS
LWVYHTQGYF

SEQ ID NO: 4280 - protein, 10 aa, HUMAN IMMUNODEFICIENCY VIRUS
NYTPGPGIRY

SEQ ID NO: 4281 - protein, 10 aa, HUMAN IMMUNODEFICIENCY VIRUS
NYTPGPGTRF

SEQ ID NO: 4282 - protein, 10 aa, HUMAN IMMUNODEFICIENCY VIRUS
GIRYPLTFGW

SEQ ID NO: 4283 - protein, 10 aa, HUMAN IMMUNODEFICIENCY VIRUS
GTRFPLTFGW

SEQ ID NO: 4284 - protein, 10 aa, HUMAN IMMUNODEFICIENCY VIRUS
RFPLTFGWCF

SEQ ID NO: 4285 - protein, 10 aa, HUMAN IMMUNODEFICIENCY VIRUS
RYPLTFGWCF

SEQ ID NO: 4286 - protein, 10 aa, HUMAN IMMUNODEFICIENCY VIRUS
PLTFGWCFKL

SEQ ID NO: 4287 - protein, 10 aa, HUMAN IMMUNODEFICIENCY VIRUS
LLHPICQHGM

SEQ ID NO: 4288 - protein, 10 aa, HUMAN IMMUNODEFICIENCY VIRUS
LLHPMSQHGM

SEQ ID NO: 4289 - protein, 10 aa, HUMAN IMMUNODEFICIENCY VIRUS
HMARELHPEY

SEQ ID NO: 4290 - protein, 11 aa, HUMAN IMMUNODEFICIENCY VIRUS
NTAATNADCAW

SEQ ID NO: 4291 - protein, 11 aa, HUMAN IMMUNODEFICIENCY VIRUS
PVRPQVPLRPM

SEQ ID NO: 4292 - protein, 11 aa, HUMAN IMMUNODEFICIENCY VIRUS
PLRPMTYKGAF

SEQ ID NO: 4293 - protein, 11 aa, HUMAN IMMUNODEFICIENCY VIRUS
FLKEKGGLDGL

SEQ ID NO: 4294 - protein, 11 aa, HUMAN IMMUNODEFICIENCY VIRUS
FLKEKGGLEGL

SEQ ID NO: 4295 - protein, 11 aa, HUMAN IMMUNODEFICIENCY VIRUS
GLIYSKKRQEI

SEQ ID NO: 4296 - protein, 11 aa, HUMAN IMMUNODEFICIENCY VIRUS
LIYSKKRQEIL

SEQ ID NO: 4297 - protein, 11 aa, HUMAN IMMUNODEFICIENCY VIRUS
DLWVYHTQGFF

SEQ ID NO: 4298 - protein, 11 aa, HUMAN IMMUNODEFICIENCY VIRUS
DLWVYHTQGYF

SEQ ID NO: 4299 - protein, 11 aa, HUMAN IMMUNODEFICIENCY VIRUS
VYHTQGFFPDW

SEQ ID NO: 4300 - protein, 11 aa, HUMAN IMMUNODEFICIENCY VIRUS
VYHTQGYFPDW

SEQ ID NO: 4301 - protein, 11 aa, HUMAN IMMUNODEFICIENCY VIRUS
DWQNYTPGPGI

SEQ ID NO: 4302 - protein, 11 aa, HUMAN IMMUNODEFICIENCY VIRUS
YTPGPGIRYPL

SEQ ID NO: 4303 - protein, 11 aa, HUMAN IMMUNODEFICIENCY VIRUS
YTPGPGTRFPL

SEQ ID NO: 4304 - protein, 11 aa, HUMAN IMMUNODEFICIENCY VIRUS
CLLHPMSQHGM

SEQ ID NO: 4305 - protein, 11 aa, HUMAN IMMUNODEFICIENCY VIRUS
HMARELHPEYY

SEQ ID NO: 4306 - protein, 8 aa, HUMAN IMMUNODEFICIENCY VIRUS
FFREDLAF

SEQ ID NO: 4307 - protein, 8 aa, HUMAN IMMUNODEFICIENCY VIRUS
FFRENLAF

SEQ ID NO: 4308 - protein, 8 aa, HUMAN IMMUNODEFICIENCY VIRUS
GTLNCPQI

SEQ ID NO: 4309 - protein, 8 aa, HUMAN IMMUNODEFICIENCY VIRUS
PTFNFPQI

SEQ ID NO: 4310 - protein, 8 aa, HUMAN IMMUNODEFICIENCY VIRUS
NFPQITLW

SEQ ID NO: 4311 - protein, 8 aa, HUMAN IMMUNODEFICIENCY VIRUS
SFPQITLW

SEQ ID NO: 4312 - protein, 8 aa, HUMAN IMMUNODEFICIENCY VIRUS
ITLWQRPL

SEQ ID NO: 4313 - protein, 8 aa, HUMAN IMMUNODEFICIENCY VIRUS
TIKIGGQL

SEQ ID NO: 4314 - protein, 8 aa, HUMAN IMMUNODEFICIENCY VIRUS
TVKIGGQL

SEQ ID NO: 4315 - protein, 8 aa, HUMAN IMMUNODEFICIENCY VIRUS
TVLEDINL

SEQ ID NO: 4316 - protein, 8 aa, HUMAN IMMUNODEFICIENCY VIRUS
TVLEEINL

SEQ ID NO: 4317 - protein, 8 aa, HUMAN IMMUNODEFICIENCY VIRUS
DINLPGKW

SEQ ID NO: 4318 - protein, 8 aa, HUMAN IMMUNODEFICIENCY VIRUS
EINLPGKW

SEQ ID NO: 4319 - protein, 8 aa, HUMAN IMMUNODEFICIENCY VIRUS
MIGGIGGF

SEQ ID NO: 4320 - protein, 8 aa, HUMAN IMMUNODEFICIENCY VIRUS
GFIKVRQY

SEQ ID NO: 4321 - protein, 8 aa, HUMAN IMMUNODEFICIENCY VIRUS
KVRQYDQI

SEQ ID NO: 4322 - protein, 8 aa, HUMAN IMMUNODEFICIENCY VIRUS
EICGHKAI

SEQ ID NO: 4323 - protein, 8 aa, HUMAN IMMUNODEFICIENCY VIRUS
EICGKKAI

SEQ ID NO: 4324 - protein, 8 aa, HUMAN IMMUNODEFICIENCY VIRUS
NIIGRNLL

SEQ ID NO: 4325 - protein, 8 aa, HUMAN IMMUNODEFICIENCY VIRUS
NIIGRNML

SEQ ID NO: 4326 - protein, 8 aa, HUMAN IMMUNODEFICIENCY VIRUS
LTQIGCTL

SEQ ID NO: 4327 - protein, 8 aa, HUMAN IMMUNODEFICIENCY VIRUS
LTQLGCTL

SEQ ID NO: 4328 - protein, 8 aa, HUMAN IMMUNODEFICIENCY VIRUS
QIGCTLNF

SEQ ID NO: 4329 - protein, 8 aa, HUMAN IMMUNODEFICIENCY VIRUS
QLGCTLNF

SEQ ID NO: 4330 - protein, 8 aa, HUMAN IMMUNODEFICIENCY VIRUS
PVKLKPGM

SEQ ID NO: 4331 - protein, 8 aa, HUMAN IMMUNODEFICIENCY VIRUS
KIKALTEI

SEQ ID NO: 4332 - protein, 8 aa, HUMAN IMMUNODEFICIENCY VIRUS
KIKALVEI

SEQ ID NO: 4333 - protein, 8 aa, HUMAN IMMUNODEFICIENCY VIRUS
LVEICTEM

SEQ ID NO: 4334 - protein, 8 aa, HUMAN IMMUNODEFICIENCY VIRUS
EMEKEGKI

SEQ ID NO: 4335 - protein, 8 aa, HUMAN IMMUNODEFICIENCY VIRUS
KIGPENPY

SEQ ID NO: 4336 - protein, 8 aa, HUMAN IMMUNODEFICIENCY VIRUS
RIGPENPY

SEQ ID NO: 4337 - protein, 8 aa, HUMAN IMMUNODEFICIENCY VIRUS
KWRKLVDF

SEQ ID NO: 4338 - protein, 8 aa, HUMAN IMMUNODEFICIENCY VIRUS
KLVDFREL

SEQ ID NO: 4339 - protein, 8 aa, HUMAN IMMUNODEFICIENCY VIRUS
FWEVQLGI

SEQ ID NO: 4340 - protein, 8 aa, HUMAN IMMUNODEFICIENCY VIRUS
GIPHPAGL

SEQ ID NO: 4341 - protein, 8 aa, HUMAN IMMUNODEFICIENCY VIRUS
VLDVGDAY

SEQ ID NO: 4342 - protein, 8 aa, HUMAN IMMUNODEFICIENCY VIRUS
SVPLDKDF

SEQ ID NO: 4343 - protein, 8 aa, HUMAN IMMUNODEFICIENCY VIRUS
DFRKYTAF

SEQ ID NO: 4344 - protein, 8 aa, HUMAN IMMUNODEFICIENCY VIRUS
GWKGSPAI

SEQ ID NO: 4345 - protein, 8 aa, HUMAN IMMUNODEFICIENCY VIRUS
MTKILEPF

SEQ ID NO: 4346 - protein, 8 aa, HUMAN IMMUNODEFICIENCY VIRUS
DIVIYQYM

SEQ ID NO: 4347 - protein, 8 aa, HUMAN IMMUNODEFICIENCY VIRUS
EIVIYQYM

SEQ ID NO: 4348 - protein, 8 aa, HUMAN IMMUNODEFICIENCY VIRUS
IYQYMDDL

SEQ ID NO: 4349 - protein, 8 aa, HUMAN IMMUNODEFICIENCY VIRUS
DLYVGSDL

SEQ ID NO: 4350 - protein, 8 aa, HUMAN IMMUNODEFICIENCY VIRUS
YVGSDLEI

SEQ ID NO: 4351 - protein, 8 aa, HUMAN IMMUNODEFICIENCY VIRUS
FLWMGYEL

SEQ ID NO: 4352 - protein, 8 aa, HUMAN IMMUNODEFICIENCY VIRUS
WTVQPIQL

SEQ ID NO: 4353 - protein, 8 aa, HUMAN IMMUNODEFICIENCY VIRUS
WTVQPIVL

SEQ ID NO: 4354 - protein, 8 aa, HUMAN IMMUNODEFICIENCY VIRUS
QLPEKDSW

SEQ ID NO: 4355 - protein, 8 aa, HUMAN IMMUNODEFICIENCY VIRUS
VLPEKDSW

SEQ ID NO: 4356 - protein, 8 aa, HUMAN IMMUNODEFICIENCY VIRUS
TVNDIQKL

SEQ ID NO: 4357 - protein, 8 aa, HUMAN IMMUNODEFICIENCY VIRUS
KLVGKLNW

SEQ ID NO: 4358 - protein, 8 aa, HUMAN IMMUNODEFICIENCY VIRUS
KLNWASQI

SEQ ID NO: 4359 - protein, 8 aa, HUMAN IMMUNODEFICIENCY VIRUS
KVKQLCKL

SEQ ID NO: 4360 - protein, 8 aa, HUMAN IMMUNODEFICIENCY VIRUS
KVRQLCKL

SEQ ID NO: 4361 - protein, 8 aa, HUMAN IMMUNODEFICIENCY VIRUS
LLRGAKAL

SEQ ID NO: 4362 - protein, 8 aa, HUMAN IMMUNODEFICIENCY VIRUS
LLRGTKAL

SEQ ID NO: 4363 - protein, 8 aa, HUMAN IMMUNODEFICIENCY VIRUS
ALTDIVPL

SEQ ID NO: 4364 - protein, 8 aa, HUMAN IMMUNODEFICIENCY VIRUS
ALTEVIPL

SEQ ID NO: 4365 - protein, 8 aa, HUMAN IMMUNODEFICIENCY VIRUS
PLTEEAEL

SEQ ID NO: 4366 - protein, 8 aa, HUMAN IMMUNODEFICIENCY VIRUS
ELAENREI

SEQ ID NO: 4367 - protein, 8 aa, HUMAN IMMUNODEFICIENCY VIRUS
YYDPSKDL

SEQ ID NO: 4368 - protein, 8 aa, HUMAN IMMUNODEFICIENCY VIRUS
KTGKYAKM

SEQ ID NO: 4369 - protein, 8 aa, HUMAN IMMUNODEFICIENCY VIRUS
KTGKYARM

SEQ ID NO: 4370 - protein, 8 aa, HUMAN IMMUNODEFICIENCY VIRUS
HTNDVKQL

SEQ ID NO: 4371 - protein, 8 aa, HUMAN IMMUNODEFICIENCY VIRUS
LTEAVQKI

SEQ ID NO: 4372 - protein, 8 aa, HUMAN IMMUNODEFICIENCY VIRUS
ATESIVIW

SEQ ID NO: 4373 - protein, 8 aa, HUMAN IMMUNODEFICIENCY VIRUS
IWGKIPKF

SEQ ID NO: 4374 - protein, 8 aa, HUMAN IMMUNODEFICIENCY VIRUS
IWGKTPKF

SEQ ID NO: 4375 - protein, 8 aa, HUMAN IMMUNODEFICIENCY VIRUS
ETWWTDYW

SEQ ID NO: 4376 - protein, 8 aa, HUMAN IMMUNODEFICIENCY VIRUS
DYWQATWI

SEQ ID NO: 4377 - protein, 8 aa, HUMAN IMMUNODEFICIENCY VIRUS
EYWQATWI

SEQ ID NO: 4378 - protein, 8 aa, HUMAN IMMUNODEFICIENCY VIRUS
TWIPEWEF

SEQ ID NO: 4379 - protein, 8 aa, HUMAN IMMUNODEFICIENCY VIRUS
EFVNTPPL

SEQ ID NO: 4380 - protein, 8 aa, HUMAN IMMUNODEFICIENCY VIRUS
NTPPLVKL

SEQ ID NO: 4381 - protein, 8 aa, HUMAN IMMUNODEFICIENCY VIRUS
LVKLWYQL

SEQ ID NO: 4382 - protein, 8 aa, HUMAN IMMUNODEFICIENCY VIRUS
PIVGAETF

SEQ ID NO: 4383 - protein, 8 aa, HUMAN IMMUNODEFICIENCY VIRUS
IVGAETFY

SEQ ID NO: 4384 - protein, 8 aa, HUMAN IMMUNODEFICIENCY VIRUS
TTNQKTEL

SEQ ID NO: 4385 - protein, 8 aa, HUMAN IMMUNODEFICIENCY VIRUS
KTELQAIY

SEQ ID NO: 4386 - protein, 8 aa, HUMAN IMMUNODEFICIENCY VIRUS
NIVTDSQY

SEQ ID NO: 4387 - protein, 8 aa, HUMAN IMMUNODEFICIENCY VIRUS
VTDSQYAL

SEQ ID NO: 4388 - protein, 8 aa, HUMAN IMMUNODEFICIENCY VIRUS
LIKKEKVY

SEQ ID NO: 4389 - protein, 8 aa, HUMAN IMMUNODEFICIENCY VIRUS
WVPAHKGI

SEQ ID NO: 4390 - protein, 8 aa, HUMAN IMMUNODEFICIENCY VIRUS
GIRKVLFL

SEQ ID NO: 4391 - protein, 8 aa, HUMAN IMMUNODEFICIENCY VIRUS
KVLFLDGI

SEQ ID NO: 4392 - protein, 8 aa, HUMAN IMMUNODEFICIENCY VIRUS
AMASDFNL

SEQ ID NO: 4393 - protein, 8 aa, HUMAN IMMUNODEFICIENCY VIRUS
QVDCSPGI

SEQ ID NO: 4394 - protein, 8 aa, HUMAN IMMUNODEFICIENCY VIRUS
CTHLEGKI

SEQ ID NO: 4395 - protein, 8 aa, HUMAN IMMUNODEFICIENCY VIRUS
HLEGKIIL

SEQ ID NO: 4396 - protein, 8 aa, HUMAN IMMUNODEFICIENCY VIRUS
HLEGKVIL

SEQ ID NO: 4397 - protein, 8 aa, HUMAN IMMUNODEFICIENCY VIRUS
AVHVASGY

SEQ ID NO: 4398 - protein, 8 aa, HUMAN IMMUNODEFICIENCY VIRUS
GYIEAEVI

SEQ ID NO: 4399 - protein, 8 aa, HUMAN IMMUNODEFICIENCY VIRUS
ETGQETAY

SEQ ID NO: 4400 - protein, 8 aa, HUMAN IMMUNODEFICIENCY VIRUS
ILKLAGRW

SEQ ID NO: 4401 - protein, 8 aa, HUMAN IMMUNODEFICIENCY VIRUS
LLKLAGRW

SEQ ID NO: 4402 - protein, 8 aa, HUMAN IMMUNODEFICIENCY VIRUS
HTDNGSNF

SEQ ID NO: 4403 - protein, 8 aa, HUMAN IMMUNODEFICIENCY VIRUS
TTVKAACW

SEQ ID NO: 4404 - protein, 8 aa, HUMAN IMMUNODEFICIENCY VIRUS
AVKAACWW

SEQ ID NO: 4405 - protein, 8 aa, HUMAN IMMUNODEFICIENCY VIRUS
TVKAACWW

SEQ ID NO: 4406 - protein, 8 aa, HUMAN IMMUNODEFICIENCY VIRUS
GIKQEFGI

SEQ ID NO: 4407 - protein, 8 aa, HUMAN IMMUNODEFICIENCY VIRUS
GIQQEFGI

SEQ ID NO: 4408 - protein, 8 aa, HUMAN IMMUNODEFICIENCY VIRUS
HLKTAVQM

SEQ ID NO: 4409 - protein, 8 aa, HUMAN IMMUNODEFICIENCY VIRUS
AVQMAVFI

SEQ ID NO: 4410 - protein, 8 aa, HUMAN IMMUNODEFICIENCY VIRUS
NFKRKGGI

SEQ ID NO: 4411 - protein, 8 aa, HUMAN IMMUNODEFICIENCY VIRUS
GYSAGERI

SEQ ID NO: 4412 - protein, 8 aa, HUMAN IMMUNODEFICIENCY VIRUS
QIIKIQNF

SEQ ID NO: 4413 - protein, 8 aa, HUMAN IMMUNODEFICIENCY VIRUS
QITKIQNF

SEQ ID NO: 4414 - protein, 8 aa, HUMAN IMMUNODEFICIENCY VIRUS
KIQNFRVY

SEQ ID NO: 4415 - protein, 8 aa, HUMAN IMMUNODEFICIENCY VIRUS
IWKGPAKL

SEQ ID NO: 4416 - protein, 8 aa, HUMAN IMMUNODEFICIENCY VIRUS
LWKGPAKL

SEQ ID NO: 4417 - protein, 8 aa, HUMAN IMMUNODEFICIENCY VIRUS
VIQDNSDI

SEQ ID NO: 4418 - protein, 8 aa, HUMAN IMMUNODEFICIENCY VIRUS
VIQDNSEI

SEQ ID NO: 4419 - protein, 9 aa, HUMAN IMMUNODEFICIENCY VIRUS
PTRRELQVW

SEQ ID NO: 4420 - protein, 9 aa, HUMAN IMMUNODEFICIENCY VIRUS
GTTLNFPQI

SEQ ID NO: 4421 - protein, 9 aa, HUMAN IMMUNODEFICIENCY VIRUS
AISLSLPQI

SEQ ID NO: 4422 - protein, 9 aa, HUMAN IMMUNODEFICIENCY VIRUS
SFSFPQITL

SEQ ID NO: 4423 - protein, 9 aa, HUMAN IMMUNODEFICIENCY VIRUS
QITLWQRPL

SEQ ID NO: 4424 - protein, 9 aa, HUMAN IMMUNODEFICIENCY VIRUS
LWQRPLVTI

SEQ ID NO: 4425 - protein, 9 aa, HUMAN IMMUNODEFICIENCY VIRUS
VTIKIGGQL

SEQ ID NO: 4426 - protein, 9 aa, HUMAN IMMUNODEFICIENCY VIRUS
VTVKIGGQL

SEQ ID NO: 4427 - protein, 9 aa, HUMAN IMMUNODEFICIENCY VIRUS
DTGADDTVL

SEQ ID NO: 4428 - protein, 9 aa, HUMAN IMMUNODEFICIENCY VIRUS
DTVLEDINL

SEQ ID NO: 4429 - protein, 9 aa, HUMAN IMMUNODEFICIENCY VIRUS
DTVLEEINL

SEQ ID NO: 4430 - protein, 9 aa, HUMAN IMMUNODEFICIENCY VIRUS
KMIGGIGGF

SEQ ID NO: 4431 - protein, 9 aa, HUMAN IMMUNODEFICIENCY VIRUS
MIGGIGGFI

SEQ ID NO: 4432 - protein, 9 aa, HUMAN IMMUNODEFICIENCY VIRUS
KVRQYDQIL

SEQ ID NO: 4433 - protein, 9 aa, HUMAN IMMUNODEFICIENCY VIRUS
QYDQILIEI

SEQ ID NO: 4434 - protein, 9 aa, HUMAN IMMUNODEFICIENCY VIRUS
QYDQIPIEI

SEQ ID NO: 4435 - protein, 9 aa, HUMAN IMMUNODEFICIENCY VIRUS
LVGPTPVNI

SEQ ID NO: 4436 - protein, 9 aa, HUMAN IMMUNODEFICIENCY VIRUS
PVNIIGRNL

SEQ ID NO: 4437 - protein, 9 aa, HUMAN IMMUNODEFICIENCY VIRUS
PVNIIGRNM

SEQ ID NO: 4438 - protein, 9 aa, HUMAN IMMUNODEFICIENCY VIRUS
LLTQIGCTL

SEQ ID NO: 4439 - protein, 9 aa, HUMAN IMMUNODEFICIENCY VIRUS
MLTQIGCTL

SEQ ID NO: 4440 - protein, 9 aa, HUMAN IMMUNODEFICIENCY VIRUS
MLTQLGCTL

SEQ ID NO: 4441 - protein, 9 aa, HUMAN IMMUNODEFICIENCY VIRUS
TLNFPISPI

SEQ ID NO: 4442 - protein, 9 aa, HUMAN IMMUNODEFICIENCY VIRUS
PIETVPVKL

SEQ ID NO: 4443 - protein, 9 aa, HUMAN IMMUNODEFICIENCY VIRUS
QWPLTEEKI

SEQ ID NO: 4444 - protein, 9 aa, HUMAN IMMUNODEFICIENCY VIRUS
LTEEKIKAL

SEQ ID NO: 4445 - protein, 9 aa, HUMAN IMMUNODEFICIENCY VIRUS
ALVEICTEM

SEQ ID NO: 4446 - protein, 9 aa, HUMAN IMMUNODEFICIENCY VIRUS
PYNTPIFAI

SEQ ID NO: 4447 - protein, 9 aa, HUMAN IMMUNODEFICIENCY VIRUS
PYNTPVFAI

SEQ ID NO: 4448 - protein, 9 aa, HUMAN IMMUNODEFICIENCY VIRUS
ELNKRTQDF

SEQ ID NO: 4449 - protein, 9 aa, HUMAN IMMUNODEFICIENCY VIRUS
DFWEVQLGI

SEQ ID NO: 4450 - protein, 9 aa, HUMAN IMMUNODEFICIENCY VIRUS
TVLDVGDAY

SEQ ID NO: 4451 - protein, 9 aa, HUMAN IMMUNODEFICIENCY VIRUS
VLDVGDAYF

SEQ ID NO: 4452 - protein, 9 aa, HUMAN IMMUNODEFICIENCY VIRUS
PLDKDFRKY

SEQ ID NO: 4453 - protein, 9 aa, HUMAN IMMUNODEFICIENCY VIRUS
YTAFTIPSI

SEQ ID NO: 4454 - protein, 9 aa, HUMAN IMMUNODEFICIENCY VIRUS
SINNETPGI

SEQ ID NO: 4455 - protein, 9 aa, HUMAN IMMUNODEFICIENCY VIRUS
STNNETPGI

SEQ ID NO: 4456 - protein, 9 aa, HUMAN IMMUNODEFICIENCY VIRUS
ETPGIRYQY

SEQ ID NO: 4457 - protein, 9 aa, HUMAN IMMUNODEFICIENCY VIRUS
GIRYQYNVL

SEQ ID NO: 4458 - protein, 9 aa, HUMAN IMMUNODEFICIENCY VIRUS
QYNVLPQGW

SEQ ID NO: 4459 - protein, 9 aa, HUMAN IMMUNODEFICIENCY VIRUS
GWKGSPAIF

SEQ ID NO: 4460 - protein, 9 aa, HUMAN IMMUNODEFICIENCY VIRUS
IFQSSMTKI

SEQ ID NO: 4461 - protein, 9 aa, HUMAN IMMUNODEFICIENCY VIRUS
SMTKILEPF

SEQ ID NO: 4462 - protein, 9 aa, HUMAN IMMUNODEFICIENCY VIRUS
PFRKQNPDI

SEQ ID NO: 4463 - protein, 9 aa, HUMAN IMMUNODEFICIENCY VIRUS
VIYQYMDDL

SEQ ID NO: 4464 - protein, 9 aa, HUMAN IMMUNODEFICIENCY VIRUS
IYQYMDDLY

SEQ ID NO: 4465 - protein, 9 aa, HUMAN IMMUNODEFICIENCY VIRUS
LYVGSDLEI

SEQ ID NO: 4466 - protein, 9 aa, HUMAN IMMUNODEFICIENCY VIRUS
EIGQHRAKI

SEQ ID NO: 4467 - protein, 9 aa, HUMAN IMMUNODEFICIENCY VIRUS
EIGQHRTKI

SEQ ID NO: 4468 - protein, 9 aa, HUMAN IMMUNODEFICIENCY VIRUS
KIEELREHL

SEQ ID NO: 4469 - protein, 9 aa, HUMAN IMMUNODEFICIENCY VIRUS
KIEELRQHL

SEQ ID NO: 4470 - protein, 9 aa, HUMAN IMMUNODEFICIENCY VIRUS
ELREHLLKW

SEQ ID NO: 4471 - protein, 9 aa, HUMAN IMMUNODEFICIENCY VIRUS
ELRQHLLRW

SEQ ID NO: 4472 - protein, 9 aa, HUMAN IMMUNODEFICIENCY VIRUS
PFLWMGYEL

SEQ ID NO: 4473 - protein, 9 aa, HUMAN IMMUNODEFICIENCY VIRUS
GYELHPDKW

SEQ ID NO: 4474 - protein, 9 aa, HUMAN IMMUNODEFICIENCY VIRUS
KWTVQPIQL

SEQ ID NO: 4475 - protein, 9 aa, HUMAN IMMUNODEFICIENCY VIRUS
KWTVQPIVL

SEQ ID NO: 4476 - protein, 9 aa, HUMAN IMMUNODEFICIENCY VIRUS
IVLPEKDSW

SEQ ID NO: 4477 - protein, 9 aa, HUMAN IMMUNODEFICIENCY VIRUS
WTVNDIQKL

SEQ ID NO: 4478 - protein, 9 aa, HUMAN IMMUNODEFICIENCY VIRUS
DIQKLVGKL

SEQ ID NO: 4479 - protein, 9 aa, HUMAN IMMUNODEFICIENCY VIRUS
KLNWASQIY

SEQ ID NO: 4480 - protein, 9 aa, HUMAN IMMUNODEFICIENCY VIRUS
KVKQLCKLL

SEQ ID NO: 4481 - protein, 9 aa, HUMAN IMMUNODEFICIENCY VIRUS
KVRQLCKLL

SEQ ID NO: 4482 - protein, 9 aa, HUMAN IMMUNODEFICIENCY VIRUS
KLLRGAKAL

SEQ ID NO: 4483 - protein, 9 aa, HUMAN IMMUNODEFICIENCY VIRUS
KLLRGTKAL

SEQ ID NO: 4484 - protein, 9 aa, HUMAN IMMUNODEFICIENCY VIRUS
GTKALTEVI

SEQ ID NO: 4485 - protein, 9 aa, HUMAN IMMUNODEFICIENCY VIRUS
LTEEAELEL

SEQ ID NO: 4486 - protein, 9 aa, HUMAN IMMUNODEFICIENCY VIRUS
ELAENREIL

SEQ ID NO: 4487 - protein, 9 aa, HUMAN IMMUNODEFICIENCY VIRUS
VYYDPSKDL

SEQ ID NO: 4488 - protein, 9 aa, HUMAN IMMUNODEFICIENCY VIRUS
YYDPSKDLI

SEQ ID NO: 4489 - protein, 9 aa, HUMAN IMMUNODEFICIENCY VIRUS
TYQIYQEPF

SEQ ID NO: 4490 - protein, 9 aa, HUMAN IMMUNODEFICIENCY VIRUS
IYQEPFKNL

SEQ ID NO: 4491 - protein, 9 aa, HUMAN IMMUNODEFICIENCY VIRUS
QLTEAVQKI

SEQ ID NO: 4492 - protein, 9 aa, HUMAN IMMUNODEFICIENCY VIRUS
KIATESIVI

SEQ ID NO: 4493 - protein, 9 aa, HUMAN IMMUNODEFICIENCY VIRUS
VIWGKTPKF

SEQ ID NO: 4494 - protein, 9 aa, HUMAN IMMUNODEFICIENCY VIRUS
KTPKFKLPI

SEQ ID NO: 4495 - protein, 9 aa, HUMAN IMMUNODEFICIENCY VIRUS
KTPKFRLPI

SEQ ID NO: 4496 - protein, 9 aa, HUMAN IMMUNODEFICIENCY VIRUS
KLPIQKETW

SEQ ID NO: 4497 - protein, 9 aa, HUMAN IMMUNODEFICIENCY VIRUS
RLPIQKETW

SEQ ID NO: 4498 - protein, 9 aa, HUMAN IMMUNODEFICIENCY VIRUS
TWETWWTDY

SEQ ID NO: 4499 - protein, 9 aa, HUMAN IMMUNODEFICIENCY VIRUS
TWETWWTEY

SEQ ID NO: 4500 - protein, 9 aa, HUMAN IMMUNODEFICIENCY VIRUS
WTDYWQATW

SEQ ID NO: 4501 - protein, 9 aa, HUMAN IMMUNODEFICIENCY VIRUS
WTEYWQATW

SEQ ID NO: 4502 - protein, 9 aa, HUMAN IMMUNODEFICIENCY VIRUS
ATWIPEWEF

SEQ ID NO: 4503 - protein, 9 aa, HUMAN IMMUNODEFICIENCY VIRUS
NTPPLVKLW

SEQ ID NO: 4504 - protein, 9 aa, HUMAN IMMUNODEFICIENCY VIRUS
PLVKLWYQL

SEQ ID NO: 4505 - protein, 9 aa, HUMAN IMMUNODEFICIENCY VIRUS
WYQLEKDPI

SEQ ID NO: 4506 - protein, 9 aa, HUMAN IMMUNODEFICIENCY VIRUS
WYQLEKEPI

SEQ ID NO: 4507 - protein, 9 aa, HUMAN IMMUNODEFICIENCY VIRUS
WYQLETEPI

SEQ ID NO: 4508 - protein, 9 aa, HUMAN IMMUNODEFICIENCY VIRUS
PIVGAETFY

SEQ ID NO: 4509 - protein, 9 aa, HUMAN IMMUNODEFICIENCY VIRUS
ETKLGKAGY

SEQ ID NO: 4510 - protein, 9 aa, HUMAN IMMUNODEFICIENCY VIRUS
DTTNQKTEL

SEQ ID NO: 4511 - protein, 9 aa, HUMAN IMMUNODEFICIENCY VIRUS
ETTNQKTEL

SEQ ID NO: 4512 - protein, 9 aa, HUMAN IMMUNODEFICIENCY VIRUS
KTELQAIHL

SEQ ID NO: 4513 - protein, 9 aa, HUMAN IMMUNODEFICIENCY VIRUS
KTELQAIYL

SEQ ID NO: 4514 - protein, 9 aa, HUMAN IMMUNODEFICIENCY VIRUS
ELQAIHLAL

SEQ ID NO: 4515 - protein, 9 aa, HUMAN IMMUNODEFICIENCY VIRUS
ELQAIYLAL

SEQ ID NO: 4516 - protein, 9 aa, HUMAN IMMUNODEFICIENCY VIRUS
HLALQDSGL

SEQ ID NO: 4517 - protein, 9 aa, HUMAN IMMUNODEFICIENCY VIRUS
IVTDSQYAL

SEQ ID NO: 4518 - protein, 9 aa, HUMAN IMMUNODEFICIENCY VIRUS
LVNQIIEQL

SEQ ID NO: 4519 - protein, 9 aa, HUMAN IMMUNODEFICIENCY VIRUS
LVSQIIEQL

SEQ ID NO: 4520 - protein, 9 aa, HUMAN IMMUNODEFICIENCY VIRUS
QLIKKEKVY

SEQ ID NO: 4521 - protein, 9 aa, HUMAN IMMUNODEFICIENCY VIRUS
LIKKEKVYL

SEQ ID NO: 4522 - protein, 9 aa, HUMAN IMMUNODEFICIENCY VIRUS
AWVPAHKGI

SEQ ID NO: 4523 - protein, 9 aa, HUMAN IMMUNODEFICIENCY VIRUS
SWVPAHKGI

SEQ ID NO: 4524 - protein, 9 aa, HUMAN IMMUNODEFICIENCY VIRUS
KYHSNWRAM

SEQ ID NO: 4525 - protein, 9 aa, HUMAN IMMUNODEFICIENCY VIRUS
RYHSNWRAM

SEQ ID NO: 4526 - protein, 9 aa, HUMAN IMMUNODEFICIENCY VIRUS
NWRAMASDF

SEQ ID NO: 4527 - protein, 9 aa, HUMAN IMMUNODEFICIENCY VIRUS
QVDCSPGIW

SEQ ID NO: 4528 - protein, 9 aa, HUMAN IMMUNODEFICIENCY VIRUS
IWQLDCTHL

SEQ ID NO: 4529 - protein, 9 aa, HUMAN IMMUNODEFICIENCY VIRUS
CTHLEGKII

SEQ ID NO: 4530 - protein, 9 aa, HUMAN IMMUNODEFICIENCY VIRUS
CTHLEGKVI

SEQ ID NO: 4531 - protein, 9 aa, HUMAN IMMUNODEFICIENCY VIRUS
AVHVASGYI

SEQ ID NO: 4532 - protein, 9 aa, HUMAN IMMUNODEFICIENCY VIRUS
ETGQETAYF

SEQ ID NO: 4533 - protein, 9 aa, HUMAN IMMUNODEFICIENCY VIRUS
ETAYFILKL

SEQ ID NO: 4534 - protein, 9 aa, HUMAN IMMUNODEFICIENCY VIRUS
ETAYFLLKL

SEQ ID NO: 4535 - protein, 9 aa, HUMAN IMMUNODEFICIENCY VIRUS
FILKLAGRW

SEQ ID NO: 4536 - protein, 9 aa, HUMAN IMMUNODEFICIENCY VIRUS
FLLKLAGRW

SEQ ID NO: 4537 - protein, 9 aa, HUMAN IMMUNODEFICIENCY VIRUS
STTVKAACW

SEQ ID NO: 4538 - protein, 9 aa, HUMAN IMMUNODEFICIENCY VIRUS
TTVKAACWW

SEQ ID NO: 4539 - protein, 9 aa, HUMAN IMMUNODEFICIENCY VIRUS
WWAGIKQEF

SEQ ID NO: 4540 - protein, 9 aa, HUMAN IMMUNODEFICIENCY VIRUS
WWAGIQQEF

SEQ ID NO: 4541 - protein, 9 aa, HUMAN IMMUNODEFICIENCY VIRUS
VVESMNKEL

SEQ ID NO: 4542 - protein, 9 aa, HUMAN IMMUNODEFICIENCY VIRUS
SMNKELKKI

SEQ ID NO: 4543 - protein, 9 aa, HUMAN IMMUNODEFICIENCY VIRUS
QVRDQAEHL

SEQ ID NO: 4544 - protein, 9 aa, HUMAN IMMUNODEFICIENCY VIRUS
QVREQAEHL

SEQ ID NO: 4545 - protein, 9 aa, HUMAN IMMUNODEFICIENCY VIRUS
KTAVQMAVF

SEQ ID NO: 4546 - protein, 9 aa, HUMAN IMMUNODEFICIENCY VIRUS
QMAVFIHNF

SEQ ID NO: 4547 - protein, 9 aa, HUMAN IMMUNODEFICIENCY VIRUS
GYSAGERII

SEQ ID NO: 4548 - protein, 9 aa, HUMAN IMMUNODEFICIENCY VIRUS
IIDIIASDI

SEQ ID NO: 4549 - protein, 9 aa, HUMAN IMMUNODEFICIENCY VIRUS
IIDIIATDI

SEQ ID NO: 4550 - protein, 9 aa, HUMAN IMMUNODEFICIENCY VIRUS
IVDIIATDI

SEQ ID NO: 4551 - protein, 9 aa, HUMAN IMMUNODEFICIENCY VIRUS
ATDIQTKEL

SEQ ID NO: 4552 - protein, 9 aa, HUMAN IMMUNODEFICIENCY VIRUS
QTKELQKQI

SEQ ID NO: 4553 - protein, 9 aa, HUMAN IMMUNODEFICIENCY VIRUS
ELQKQIIKI

SEQ ID NO: 4554 - protein, 9 aa, HUMAN IMMUNODEFICIENCY VIRUS
ELQKQITKI

SEQ ID NO: 4555 - protein, 9 aa, HUMAN IMMUNODEFICIENCY VIRUS
KIQNFRVYY

SEQ ID NO: 4556 - protein, 9 aa, HUMAN IMMUNODEFICIENCY VIRUS
YYRDSRDPI

SEQ ID NO: 4557 - protein, 9 aa, HUMAN IMMUNODEFICIENCY VIRUS
YYRDSRDPL

SEQ ID NO: 4558 - protein, 9 aa, HUMAN IMMUNODEFICIENCY VIRUS
PIWKGPAKL

SEQ ID NO: 4559 - protein, 9 aa, HUMAN IMMUNODEFICIENCY VIRUS
PLWKGPAKL

SEQ ID NO: 4560 - protein, 9 aa, HUMAN IMMUNODEFICIENCY VIRUS
IWKGPAKLL

SEQ ID NO: 4561 - protein, 9 aa, HUMAN IMMUNODEFICIENCY VIRUS
LWKGPAKLL

SEQ ID NO: 4562 - protein, 9 aa, HUMAN IMMUNODEFICIENCY VIRUS
VVIQDNSDI

SEQ ID NO: 4563 - protein, 9 aa, HUMAN IMMUNODEFICIENCY VIRUS
VVIQDNSEI

SEQ ID NO: 4564 - protein, 9 aa, HUMAN IMMUNODEFICIENCY VIRUS
VVPRRKAKI

SEQ ID NO: 4565 - protein, 9 aa, HUMAN IMMUNODEFICIENCY VIRUS
VVPRRKVKI

SEQ ID NO: 4566 - protein, 9 aa, HUMAN IMMUNODEFICIENCY VIRUS
IIKDYGKQM

SEQ ID NO: 4567 - protein, 9 aa, HUMAN IMMUNODEFICIENCY VIRUS
IIRDYGKQM

SEQ ID NO: 4568 - protein, 10 aa, HUMAN IMMUNODEFICIENCY VIRUS
AFPQGEAREF

SEQ ID NO: 4569 - protein, 10 aa, HUMAN IMMUNODEFICIENCY VIRUS
STNSPTSREL

SEQ ID NO: 4570 - protein, 10 aa, HUMAN IMMUNODEFICIENCY VIRUS
GTLNCPQITL

SEQ ID NO: 4571 - protein, 10 aa, HUMAN IMMUNODEFICIENCY VIRUS
PTFNFPQITL

SEQ ID NO: 4572 - protein, 10 aa, HUMAN IMMUNODEFICIENCY VIRUS
SFSFPQITLW

SEQ ID NO: 4573 - protein, 10 aa, HUMAN IMMUNODEFICIENCY VIRUS
TLWQRPLVTI

SEQ ID NO: 4574 - protein, 10 aa, HUMAN IMMUNODEFICIENCY VIRUS
LVTIKIGGQL

SEQ ID NO: 4575 - protein, 10 aa, HUMAN IMMUNODEFICIENCY VIRUS
KIGGQLKEAL

SEQ ID NO: 4576 - protein, 10 aa, HUMAN IMMUNODEFICIENCY VIRUS
NLPGKWKPKM

SEQ ID NO: 4577 - protein, 10 aa, HUMAN IMMUNODEFICIENCY VIRUS
KWKPKMIGGI

SEQ ID NO: 4578 - protein, 10 aa, HUMAN IMMUNODEFICIENCY VIRUS
RWKPKMIGGI

SEQ ID NO: 4579 - protein, 10 aa, HUMAN IMMUNODEFICIENCY VIRUS
KMIGGIGGFI

SEQ ID NO: 4580 - protein, 10 aa, HUMAN IMMUNODEFICIENCY VIRUS
FIKVRQYDQI

SEQ ID NO: 4581 - protein, 10 aa, HUMAN IMMUNODEFICIENCY VIRUS
KVRQYDQILI

SEQ ID NO: 4582 - protein, 10 aa, HUMAN IMMUNODEFICIENCY VIRUS
KVRQYDQIPI

SEQ ID NO: 4583 - protein, 10 aa, HUMAN IMMUNODEFICIENCY VIRUS
LIEICGHKAI

SEQ ID NO: 4584 - protein, 10 aa, HUMAN IMMUNODEFICIENCY VIRUS
LIEICGKKAI

SEQ ID NO: 4585 - protein, 10 aa, HUMAN IMMUNODEFICIENCY VIRUS
VLVGPTPVNI

SEQ ID NO: 4586 - protein, 10 aa, HUMAN IMMUNODEFICIENCY VIRUS
LVGPTPVNII

SEQ ID NO: 4587 - protein, 10 aa, HUMAN IMMUNODEFICIENCY VIRUS
PVNIIGRNLL

SEQ ID NO: 4588 - protein, 10 aa, HUMAN IMMUNODEFICIENCY VIRUS
PVNIIGRNML

SEQ ID NO: 4589 - protein, 10 aa, HUMAN IMMUNODEFICIENCY VIRUS
IIGRNLLTQI

SEQ ID NO: 4590 - protein, 10 aa, HUMAN IMMUNODEFICIENCY VIRUS
IIGRNMLTQI

SEQ ID NO: 4591 - protein, 10 aa, HUMAN IMMUNODEFICIENCY VIRUS
IIGRNMLTQL

SEQ ID NO: 4592 - protein, 10 aa, HUMAN IMMUNODEFICIENCY VIRUS
NLLTQIGCTL

SEQ ID NO: 4593 - protein, 10 aa, HUMAN IMMUNODEFICIENCY VIRUS
NMLTQIGCTL

SEQ ID NO: 4594 - protein, 10 aa, HUMAN IMMUNODEFICIENCY VIRUS
NMLTQLGCTL

SEQ ID NO: 4595 - protein, 10 aa, HUMAN IMMUNODEFICIENCY VIRUS
LTQIGCTLNF

SEQ ID NO: 4596 - protein, 10 aa, HUMAN IMMUNODEFICIENCY VIRUS
LTQLGCTLNF

SEQ ID NO: 4597 - protein, 10 aa, HUMAN IMMUNODEFICIENCY VIRUS
QIGCTLNFPI

SEQ ID NO: 4598 - protein, 10 aa, HUMAN IMMUNODEFICIENCY VIRUS
QLGCTLNFPI

SEQ ID NO: 4599 - protein, 10 aa, HUMAN IMMUNODEFICIENCY VIRUS
CTLNFPISPI

SEQ ID NO: 4600 - protein, 10 aa, HUMAN IMMUNODEFICIENCY VIRUS
TVPVKLKPGM

SEQ ID NO: 4601 - protein, 10 aa, HUMAN IMMUNODEFICIENCY VIRUS
GMDGPKVKQW

SEQ ID NO: 4602 - protein, 10 aa, HUMAN IMMUNODEFICIENCY VIRUS
PLTEEKIKAL

SEQ ID NO: 4603 - protein, 10 aa, HUMAN IMMUNODEFICIENCY VIRUS
CTEMEKEGKI

SEQ ID NO: 4604 - protein, 10 aa, HUMAN IMMUNODEFICIENCY VIRUS
AIKKKDSTKW

SEQ ID NO: 4605 - protein, 10 aa, HUMAN IMMUNODEFICIENCY VIRUS
STKWRKLVDF

SEQ ID NO: 4606 - protein, 10 aa, HUMAN IMMUNODEFICIENCY VIRUS
ELNKRTQDFW

SEQ ID NO: 4607 - protein, 10 aa, HUMAN IMMUNODEFICIENCY VIRUS
RTQDFWEVQL

SEQ ID NO: 4608 - protein, 10 aa, HUMAN IMMUNODEFICIENCY VIRUS
QLGIPHPAGL

SEQ ID NO: 4609 - protein, 10 aa, HUMAN IMMUNODEFICIENCY VIRUS
VTVLDVGDAY

SEQ ID NO: 4610 - protein, 10 aa, HUMAN IMMUNODEFICIENCY VIRUS
TVLDVGDAYF

SEQ ID NO: 4611 - protein, 10 aa, HUMAN IMMUNODEFICIENCY VIRUS
YFSVPLDKDF

SEQ ID NO: 4612 - protein, 10 aa, HUMAN IMMUNODEFICIENCY VIRUS
DFRKYTAFTI

SEQ ID NO: 4613 - protein, 10 aa, HUMAN IMMUNODEFICIENCY VIRUS
KYTAFTIPSI

SEQ ID NO: 4614 - protein, 10 aa, HUMAN IMMUNODEFICIENCY VIRUS
AIFQSSMTKI

SEQ ID NO: 4615 - protein, 10 aa, HUMAN IMMUNODEFICIENCY VIRUS
IFQSSMTKIL

SEQ ID NO: 4616 - protein, 10 aa, HUMAN IMMUNODEFICIENCY VIRUS
IVIYQYMDDL

SEQ ID NO: 4617 - protein, 10 aa, HUMAN IMMUNODEFICIENCY VIRUS
VIYQYMDDLY

SEQ ID NO: 4618 - protein, 10 aa, HUMAN IMMUNODEFICIENCY VIRUS
DLYVGSDLEI

SEQ ID NO: 4619 - protein, 10 aa, HUMAN IMMUNODEFICIENCY VIRUS
KIEELREHLL

SEQ ID NO: 4620 - protein, 10 aa, HUMAN IMMUNODEFICIENCY VIRUS
KIEELRQHLL

SEQ ID NO: 4621 - protein, 10 aa, HUMAN IMMUNODEFICIENCY VIRUS
PIQLPEKDSW

SEQ ID NO: 4622 - protein, 10 aa, HUMAN IMMUNODEFICIENCY VIRUS
PIVLPEKDSW

SEQ ID NO: 4623 - protein, 10 aa, HUMAN IMMUNODEFICIENCY VIRUS
SWTVNDIQKL

SEQ ID NO: 4624 - protein, 10 aa, HUMAN IMMUNODEFICIENCY VIRUS
NWASQIYAGI

SEQ ID NO: 4625 - protein, 10 aa, HUMAN IMMUNODEFICIENCY VIRUS
NWASQIYPGI

SEQ ID NO: 4626 - protein, 10 aa, HUMAN IMMUNODEFICIENCY VIRUS
IYAGIKVKQL

SEQ ID NO: 4627 - protein, 10 aa, HUMAN IMMUNODEFICIENCY VIRUS
IYPGIKVKQL

SEQ ID NO: 4628 - protein, 10 aa, HUMAN IMMUNODEFICIENCY VIRUS
IYPGIKVRQL

SEQ ID NO: 4629 - protein, 10 aa, HUMAN IMMUNODEFICIENCY VIRUS
GIKVKQLCKL

SEQ ID NO: 4630 - protein, 10 aa, HUMAN IMMUNODEFICIENCY VIRUS
GIKVRQLCKL

SEQ ID NO: 4631 - protein, 10 aa, HUMAN IMMUNODEFICIENCY VIRUS
IVPLTEEAEL

SEQ ID NO: 4632 - protein, 10 aa, HUMAN IMMUNODEFICIENCY VIRUS
VIPLTEEAEL

SEQ ID NO: 4633 - protein, 10 aa, HUMAN IMMUNODEFICIENCY VIRUS
PLTEEAELEL

SEQ ID NO: 4634 - protein, 10 aa, HUMAN IMMUNODEFICIENCY VIRUS
ELELAENREI

SEQ ID NO: 4635 - protein, 10 aa, HUMAN IMMUNODEFICIENCY VIRUS
ILKEPVHGVY

SEQ ID NO: 4636 - protein, 10 aa, HUMAN IMMUNODEFICIENCY VIRUS
GVYYDPSKDL

SEQ ID NO: 4637 - protein, 10 aa, HUMAN IMMUNODEFICIENCY VIRUS
VYYDPSKDLI

SEQ ID NO: 4638 - protein, 10 aa, HUMAN IMMUNODEFICIENCY VIRUS
EIQKQGQDQW

SEQ ID NO: 4639 - protein, 10 aa, HUMAN IMMUNODEFICIENCY VIRUS
EIQKQGQGQW

SEQ ID NO: 4640 - protein, 10 aa, HUMAN IMMUNODEFICIENCY VIRUS
WTYQIYQEPF

SEQ ID NO: 4641 - protein, 10 aa, HUMAN IMMUNODEFICIENCY VIRUS
QIYQEPFKNL

SEQ ID NO: 4642 - protein, 10 aa, HUMAN IMMUNODEFICIENCY VIRUS
PFKNLKTGKY

SEQ ID NO: 4643 - protein, 10 aa, HUMAN IMMUNODEFICIENCY VIRUS
NLKTGKYAKM

SEQ ID NO: 4644 - protein, 10 aa, HUMAN IMMUNODEFICIENCY VIRUS
NLKTGKYARM

SEQ ID NO: 4645 - protein, 10 aa, HUMAN IMMUNODEFICIENCY VIRUS
AVQKIATESI

SEQ ID NO: 4646 - protein, 10 aa, HUMAN IMMUNODEFICIENCY VIRUS
KIATESIVIW

SEQ ID NO: 4647 - protein, 10 aa, HUMAN IMMUNODEFICIENCY VIRUS
IVIWGKTPKF

SEQ ID NO: 4648 - protein, 10 aa, HUMAN IMMUNODEFICIENCY VIRUS
IWGKTPKFKL

SEQ ID NO: 4649 - protein, 10 aa, HUMAN IMMUNODEFICIENCY VIRUS
IWGKTPKFRL

SEQ ID NO: 4650 - protein, 10 aa, HUMAN IMMUNODEFICIENCY VIRUS
PIQKETWEAW

SEQ ID NO: 4651 - protein, 10 aa, HUMAN IMMUNODEFICIENCY VIRUS
PIQKETWETW

SEQ ID NO: 4652 - protein, 10 aa, HUMAN IMMUNODEFICIENCY VIRUS
ETWETWWTDY

SEQ ID NO: 4653 - protein, 10 aa, HUMAN IMMUNODEFICIENCY VIRUS
ETWETWWTEY

SEQ ID NO: 4654 - protein, 10 aa, HUMAN IMMUNODEFICIENCY VIRUS
TWETWWTDYW

SEQ ID NO: 4655 - protein, 10 aa, HUMAN IMMUNODEFICIENCY VIRUS
WWTDYWQATW

SEQ ID NO: 4656 - protein, 10 aa, HUMAN IMMUNODEFICIENCY VIRUS
WWTEYWQATW

SEQ ID NO: 4657 - protein, 10 aa, HUMAN IMMUNODEFICIENCY VIRUS
WTDYWQATWI

SEQ ID NO: 4658 - protein, 10 aa, HUMAN IMMUNODEFICIENCY VIRUS
WTEYWQATWI

SEQ ID NO: 4659 - protein, 10 aa, HUMAN IMMUNODEFICIENCY VIRUS
YWQATWIPEW

SEQ ID NO: 4660 - protein, 10 aa, HUMAN IMMUNODEFICIENCY VIRUS
EWEFVNTPPL

SEQ ID NO: 4661 - protein, 10 aa, HUMAN IMMUNODEFICIENCY VIRUS
FVNTPPLVKL

SEQ ID NO: 4662 - protein, 10 aa, HUMAN IMMUNODEFICIENCY VIRUS
NTPPLVKLWY

SEQ ID NO: 4663 - protein, 10 aa, HUMAN IMMUNODEFICIENCY VIRUS
LWYQLEKDPI

SEQ ID NO: 4664 - protein, 10 aa, HUMAN IMMUNODEFICIENCY VIRUS
LWYQLEKEPI

SEQ ID NO: 4665 - protein, 10 aa, HUMAN IMMUNODEFICIENCY VIRUS
LWYQLETEPI

SEQ ID NO: 4666 - protein, 10 aa, HUMAN IMMUNODEFICIENCY VIRUS
EVNIVTDSQY

SEQ ID NO: 4667 - protein, 10 aa, HUMAN IMMUNODEFICIENCY VIRUS
NIVTDSQYAL

SEQ ID NO: 4668 - protein, 10 aa, HUMAN IMMUNODEFICIENCY VIRUS
VTDSQYALGI

SEQ ID NO: 4669 - protein, 10 aa, HUMAN IMMUNODEFICIENCY VIRUS
ELVNQIIEQL

SEQ ID NO: 4670 - protein, 10 aa, HUMAN IMMUNODEFICIENCY VIRUS
ELVSQIIEQL

SEQ ID NO: 4671 - protein, 10 aa, HUMAN IMMUNODEFICIENCY VIRUS
LVNQIIEQLI

SEQ ID NO: 4672 - protein, 10 aa, HUMAN IMMUNODEFICIENCY VIRUS
LVSQIIEQLI

SEQ ID NO: 4673 - protein, 10 aa, HUMAN IMMUNODEFICIENCY VIRUS
QLIKKEKVYL

SEQ ID NO: 4674 - protein, 10 aa, HUMAN IMMUNODEFICIENCY VIRUS
QVDKLVSAGI

SEQ ID NO: 4675 - protein, 10 aa, HUMAN IMMUNODEFICIENCY VIRUS
QVDKLVSSGI

SEQ ID NO: 4676 - protein, 10 aa, HUMAN IMMUNODEFICIENCY VIRUS
LVSAGIRKVL

SEQ ID NO: 4677 - protein, 10 aa, HUMAN IMMUNODEFICIENCY VIRUS
LVSSGIRKVL

SEQ ID NO: 4678 - protein, 10 aa, HUMAN IMMUNODEFICIENCY VIRUS
NLPPIVAKEI

SEQ ID NO: 4679 - protein, 10 aa, HUMAN IMMUNODEFICIENCY VIRUS
NLPPVVAKEI

SEQ ID NO: 4680 - protein, 10 aa, HUMAN IMMUNODEFICIENCY VIRUS
IVASCDKCQL

SEQ ID NO: 4681 - protein, 10 aa, HUMAN IMMUNODEFICIENCY VIRUS
GIWQLDCTHL

SEQ ID NO: 4682 - protein, 10 aa, HUMAN IMMUNODEFICIENCY VIRUS
CTHLEGKIIL

SEQ ID NO: 4683 - protein, 10 aa, HUMAN IMMUNODEFICIENCY VIRUS
CTHLEGKVIL

SEQ ID NO: 4684 - protein, 10 aa, HUMAN IMMUNODEFICIENCY VIRUS
LVAVHVASGY

SEQ ID NO: 4685 - protein, 10 aa, HUMAN IMMUNODEFICIENCY VIRUS
ETGQETAYFI

SEQ ID NO: 4686 - protein, 10 aa, HUMAN IMMUNODEFICIENCY VIRUS
ETGQETAYFL

SEQ ID NO: 4687 - protein, 10 aa, HUMAN IMMUNODEFICIENCY VIRUS
YFILKLAGRW

SEQ ID NO: 4688 - protein, 10 aa, HUMAN IMMUNODEFICIENCY VIRUS
YFLLKLAGRW

SEQ ID NO: 4689 - protein, 10 aa, HUMAN IMMUNODEFICIENCY VIRUS
TIHTDNGSNF

SEQ ID NO: 4690 - protein, 10 aa, HUMAN IMMUNODEFICIENCY VIRUS
VIHTDNGSNF

SEQ ID NO: 4691 - protein, 10 aa, HUMAN IMMUNODEFICIENCY VIRUS
STTVKAACWW

SEQ ID NO: 4692 - protein, 10 aa, HUMAN IMMUNODEFICIENCY VIRUS
CWWAGIKQEF

SEQ ID NO: 4693 - protein, 10 aa, HUMAN IMMUNODEFICIENCY VIRUS
CWWAGIQQEF

SEQ ID NO: 4694 - protein, 10 aa, HUMAN IMMUNODEFICIENCY VIRUS
GIKQEFGIPY

SEQ ID NO: 4695 - protein, 10 aa, HUMAN IMMUNODEFICIENCY VIRUS
GIQQEFGIPY

SEQ ID NO: 4696 - protein, 10 aa, HUMAN IMMUNODEFICIENCY VIRUS
GVVESMNKEL

SEQ ID NO: 4697 - protein, 10 aa, HUMAN IMMUNODEFICIENCY VIRUS
SMNKELKKII

SEQ ID NO: 4698 - protein, 10 aa, HUMAN IMMUNODEFICIENCY VIRUS
KTAVQMAVFI

SEQ ID NO: 4699 - protein, 10 aa, HUMAN IMMUNODEFICIENCY VIRUS
RIIDIIASDI

SEQ ID NO: 4700 - protein, 10 aa, HUMAN IMMUNODEFICIENCY VIRUS
RIIDIIATDI

SEQ ID NO: 4701 - protein, 10 aa, HUMAN IMMUNODEFICIENCY VIRUS
RIVDIIATDI

SEQ ID NO: 4702 - protein, 10 aa, HUMAN IMMUNODEFICIENCY VIRUS
QTKELQKQII

SEQ ID NO: 4703 - protein, 10 aa, HUMAN IMMUNODEFICIENCY VIRUS
IIKIQNFRVY

SEQ ID NO: 4704 - protein, 10 aa, HUMAN IMMUNODEFICIENCY VIRUS
ITKIQNFRVY

SEQ ID NO: 4705 - protein, 10 aa, HUMAN IMMUNODEFICIENCY VIRUS
VYYRDSRDPI

SEQ ID NO: 4706 - protein, 10 aa, HUMAN IMMUNODEFICIENCY VIRUS
VYYRDSRDPL

SEQ ID NO: 4707 - protein, 10 aa, HUMAN IMMUNODEFICIENCY VIRUS
YYRDSRDPIW

SEQ ID NO: 4708 - protein, 10 aa, HUMAN IMMUNODEFICIENCY VIRUS
YYRDSRDPLW

SEQ ID NO: 4709 - protein, 10 aa, HUMAN IMMUNODEFICIENCY VIRUS
PIWKGPAKLL

SEQ ID NO: 4710 - protein, 10 aa, HUMAN IMMUNODEFICIENCY VIRUS
PLWKGPAKLL

SEQ ID NO: 4711 - protein, 10 aa, HUMAN IMMUNODEFICIENCY VIRUS
IWKGPAKLLW

SEQ ID NO: 4712 - protein, 10 aa, HUMAN IMMUNODEFICIENCY VIRUS
LWKGPAKLLW

SEQ ID NO: 4713 - protein, 10 aa, HUMAN IMMUNODEFICIENCY VIRUS
LWKGEGAVVI

SEQ ID NO: 4714 - protein, 10 aa, HUMAN IMMUNODEFICIENCY VIRUS
AVVIQDNSDI

SEQ ID NO: 4715 - protein, 10 aa, HUMAN IMMUNODEFICIENCY VIRUS
AVVIQDNSEI

SEQ ID NO: 4716 - protein, 10 aa, HUMAN IMMUNODEFICIENCY VIRUS
KVVPRRKAKI

SEQ ID NO: 4717 - protein, 10 aa, HUMAN IMMUNODEFICIENCY VIRUS
KVVPRRKVKI

SEQ ID NO: 4718 - protein, 10 aa, HUMAN IMMUNODEFICIENCY VIRUS
VVPRRKAKII

SEQ ID NO: 4719 - protein, 10 aa, HUMAN IMMUNODEFICIENCY VIRUS
VVPRRKVKII

SEQ ID NO: 4720 - protein, 10 aa, HUMAN IMMUNODEFICIENCY VIRUS
KIIKDYGKQM

SEQ ID NO: 4721 - protein, 10 aa, HUMAN IMMUNODEFICIENCY VIRUS
KIIRDYGKQM

SEQ ID NO: 4722 - protein, 11 aa, HUMAN IMMUNODEFICIENCY VIRUS
GTTLNFPQITF

SEQ ID NO: 4723 - protein, 11 aa, HUMAN IMMUNODEFICIENCY VIRUS
AISLSLPQITL

SEQ ID NO: 4724 - protein, 11 aa, HUMAN IMMUNODEFICIENCY VIRUS
GTLNCPQITLW

SEQ ID NO: 4725 - protein, 11 aa, HUMAN IMMUNODEFICIENCY VIRUS
PTFNFPQITLW

SEQ ID NO: 4726 - protein, 11 aa, HUMAN IMMUNODEFICIENCY VIRUS
ITLWQRPLVTI

SEQ ID NO: 4727 - protein, 11 aa, HUMAN IMMUNODEFICIENCY VIRUS
LWQRPLVTIKI

SEQ ID NO: 4728 - protein, 11 aa, HUMAN IMMUNODEFICIENCY VIRUS
LWQRPLVTVKI

SEQ ID NO: 4729 - protein, 11 aa, HUMAN IMMUNODEFICIENCY VIRUS
PLVTIKIGGQL

SEQ ID NO: 4730 - protein, 11 aa, HUMAN IMMUNODEFICIENCY VIRUS
KIGGQLKEALL

SEQ ID NO: 4731 - protein, 11 aa, HUMAN IMMUNODEFICIENCY VIRUS
LLDTGADDTVL

SEQ ID NO: 4732 - protein, 11 aa, HUMAN IMMUNODEFICIENCY VIRUS
VLEDINLPGKW

SEQ ID NO: 4733 - protein, 11 aa, HUMAN IMMUNODEFICIENCY VIRUS
VLEEINLPGKW

SEQ ID NO: 4734 - protein, 11 aa, HUMAN IMMUNODEFICIENCY VIRUS
NLPGKWKPKMI

SEQ ID NO: 4735 - protein, 11 aa, HUMAN IMMUNODEFICIENCY VIRUS
GIGGFIKVRQY

SEQ ID NO: 4736 - protein, 11 aa, HUMAN IMMUNODEFICIENCY VIRUS
GFIKVRQYDQI

SEQ ID NO: 4737 - protein, 11 aa, HUMAN IMMUNODEFICIENCY VIRUS
FIKVRQYDQIL

SEQ ID NO: 4738 - protein, 11 aa, HUMAN IMMUNODEFICIENCY VIRUS
ILIEICGKKAI

SEQ ID NO: 4739 - protein, 11 aa, HUMAN IMMUNODEFICIENCY VIRUS
TVLVGPTPVNI

SEQ ID NO: 4740 - protein, 11 aa, HUMAN IMMUNODEFICIENCY VIRUS
VLVGPTPVNII

SEQ ID NO: 4741 - protein, 11 aa, HUMAN IMMUNODEFICIENCY VIRUS
PTPVNIIGRNL

SEQ ID NO: 4742 - protein, 11 aa, HUMAN IMMUNODEFICIENCY VIRUS
PTPVNIIGRNM

SEQ ID NO: 4743 - protein, 11 aa, HUMAN IMMUNODEFICIENCY VIRUS
NIIGRNLLTQI

SEQ ID NO: 4744 - protein, 11 aa, HUMAN IMMUNODEFICIENCY VIRUS
NIIGRNMLTQI

SEQ ID NO: 4745 - protein, 11 aa, HUMAN IMMUNODEFICIENCY VIRUS
NIIGRNMLTQL

SEQ ID NO: 4746 - protein, 11 aa, HUMAN IMMUNODEFICIENCY VIRUS
LLTQIGCTLNF

SEQ ID NO: 4747 - protein, 11 aa, HUMAN IMMUNODEFICIENCY VIRUS
MLTQIGCTLNF

SEQ ID NO: 4748 - protein, 11 aa, HUMAN IMMUNODEFICIENCY VIRUS
MLTQLGCTLNF

SEQ ID NO: 4749 - protein, 11 aa, HUMAN IMMUNODEFICIENCY VIRUS
ETVPVKLKPGM

SEQ ID NO: 4750 - protein, 11 aa, HUMAN IMMUNODEFICIENCY VIRUS
EMEKEGKISKI

SEQ ID NO: 4751 - protein, 11 aa, HUMAN IMMUNODEFICIENCY VIRUS
KISKIGPENPY

SEQ ID NO: 4752 - protein, 11 aa, HUMAN IMMUNODEFICIENCY VIRUS
KISRIGPENPY

SEQ ID NO: 4753 - protein, 11 aa, HUMAN IMMUNODEFICIENCY VIRUS
KWRKLVDFREL

SEQ ID NO: 4754 - protein, 11 aa, HUMAN IMMUNODEFICIENCY VIRUS
GLKKKKSVTVL

SEQ ID NO: 4755 - protein, 11 aa, HUMAN IMMUNODEFICIENCY VIRUS
SVTVLDVGDAY

SEQ ID NO: 4756 - protein, 11 aa, HUMAN IMMUNODEFICIENCY VIRUS
VTVLDVGDAYF

SEQ ID NO: 4757 - protein, 11 aa, HUMAN IMMUNODEFICIENCY VIRUS
DVGDAYFSVPL

SEQ ID NO: 4758 - protein, 11 aa, HUMAN IMMUNODEFICIENCY VIRUS
AYFSVPLDKDF

SEQ ID NO: 4759 - protein, 11 aa, HUMAN IMMUNODEFICIENCY VIRUS
SVPLDKDFRKY

SEQ ID NO: 4760 - protein, 11 aa, HUMAN IMMUNODEFICIENCY VIRUS
SINNETPGIRY

SEQ ID NO: 4761 - protein, 11 aa, HUMAN IMMUNODEFICIENCY VIRUS
STNNETPGIRY

SEQ ID NO: 4762 - protein, 11 aa, HUMAN IMMUNODEFICIENCY VIRUS
RYQYNVLPQGW

SEQ ID NO: 4763 - protein, 11 aa, HUMAN IMMUNODEFICIENCY VIRUS
AIFQSSMTKIL

SEQ ID NO: 4764 - protein, 11 aa, HUMAN IMMUNODEFICIENCY VIRUS
PFRKQNPDIVI

SEQ ID NO: 4765 - protein, 11 aa, HUMAN IMMUNODEFICIENCY VIRUS
DIVIYQYMDDL

SEQ ID NO: 4766 - protein, 11 aa, HUMAN IMMUNODEFICIENCY VIRUS
EIVIYQYMDDL

SEQ ID NO: 4767 - protein, 11 aa, HUMAN IMMUNODEFICIENCY VIRUS
IVIYQYMDDLY

SEQ ID NO: 4768 - protein, 11 aa, HUMAN IMMUNODEFICIENCY VIRUS
YMDDLYVGSDL

SEQ ID NO: 4769 - protein, 11 aa, HUMAN IMMUNODEFICIENCY VIRUS
DLEIGQHRAKI

SEQ ID NO: 4770 - protein, 11 aa, HUMAN IMMUNODEFICIENCY VIRUS
DLEIGQHRTKI

SEQ ID NO: 4771 - protein, 11 aa, HUMAN IMMUNODEFICIENCY VIRUS
RTKIEELRQHL

SEQ ID NO: 4772 - protein, 11 aa, HUMAN IMMUNODEFICIENCY VIRUS
ELREHLLKWGF

SEQ ID NO: 4773 - protein, 11 aa, HUMAN IMMUNODEFICIENCY VIRUS
ELRQHLLRWGF

SEQ ID NO: 4774 - protein, 11 aa, HUMAN IMMUNODEFICIENCY VIRUS
WMGYELHPDKW

SEQ ID NO: 4775 - protein, 11 aa, HUMAN IMMUNODEFICIENCY VIRUS
DIQKLVGKLNW

SEQ ID NO: 4776 - protein, 11 aa, HUMAN IMMUNODEFICIENCY VIRUS
LVGKLNWASQI

SEQ ID NO: 4777 - protein, 11 aa, HUMAN IMMUNODEFICIENCY VIRUS
QIYAGIKVKQL

SEQ ID NO: 4778 - protein, 11 aa, HUMAN IMMUNODEFICIENCY VIRUS
QIYPGIKVKQL

SEQ ID NO: 4779 - protein, 11 aa, HUMAN IMMUNODEFICIENCY VIRUS
QIYPGIKVRQL

SEQ ID NO: 4780 - protein, 11 aa, HUMAN IMMUNODEFICIENCY VIRUS
GIKVKQLCKLL

SEQ ID NO: 4781 - protein, 11 aa, HUMAN IMMUNODEFICIENCY VIRUS
GIKVRQLCKLL

SEQ ID NO: 4782 - protein, 11 aa, HUMAN IMMUNODEFICIENCY VIRUS
LLRGAKALTDI

SEQ ID NO: 4783 - protein, 11 aa, HUMAN IMMUNODEFICIENCY VIRUS
GTKALTEVIPL

SEQ ID NO: 4784 - protein, 11 aa, HUMAN IMMUNODEFICIENCY VIRUS
DIVPLTEEAEL

SEQ ID NO: 4785 - protein, 11 aa, HUMAN IMMUNODEFICIENCY VIRUS
EVIPLTEEAEL

SEQ ID NO: 4786 - protein, 11 aa, HUMAN IMMUNODEFICIENCY VIRUS
ELELAENREIL

SEQ ID NO: 4787 - protein, 11 aa, HUMAN IMMUNODEFICIENCY VIRUS
EILKEPVHGVY

SEQ ID NO: 4788 - protein, 11 aa, HUMAN IMMUNODEFICIENCY VIRUS
ILKEPVHGVYY

SEQ ID NO: 4789 - protein, 11 aa, HUMAN IMMUNODEFICIENCY VIRUS
GVYYDPSKDLI

SEQ ID NO: 4790 - protein, 11 aa, HUMAN IMMUNODEFICIENCY VIRUS
QWTYQIYQEPF

SEQ ID NO: 4791 - protein, 11 aa, HUMAN IMMUNODEFICIENCY VIRUS
SIVIWGKTPKF

SEQ ID NO: 4792 - protein, 11 aa, HUMAN IMMUNODEFICIENCY VIRUS
VIWGKTPKFKL

SEQ ID NO: 4793 - protein, 11 aa, HUMAN IMMUNODEFICIENCY VIRUS
VIWGKTPKFRL

SEQ ID NO: 4794 - protein, 11 aa, HUMAN IMMUNODEFICIENCY VIRUS
KFKLPIQKETW

SEQ ID NO: 4795 - protein, 11 aa, HUMAN IMMUNODEFICIENCY VIRUS
KFRLPIQKETW

SEQ ID NO: 4796 - protein, 11 aa, HUMAN IMMUNODEFICIENCY VIRUS
PIQKETWEAWW

SEQ ID NO: 4797 - protein, 11 aa, HUMAN IMMUNODEFICIENCY VIRUS
PIQKETWETWW

SEQ ID NO: 4798 - protein, 11 aa, HUMAN IMMUNODEFICIENCY VIRUS
ETWETWWTDYW

SEQ ID NO: 4799 - protein, 11 aa, HUMAN IMMUNODEFICIENCY VIRUS
TWWTDYWQATW

SEQ ID NO: 4800 - protein, 11 aa, HUMAN IMMUNODEFICIENCY VIRUS
TWWTEYWQATW

SEQ ID NO: 4801 - protein, 11 aa, HUMAN IMMUNODEFICIENCY VIRUS
WWTDYWQATWI

SEQ ID NO: 4802 - protein, 11 aa, HUMAN IMMUNODEFICIENCY VIRUS
WWTEYWQATWI

SEQ ID NO: 4803 - protein, 11 aa, HUMAN IMMUNODEFICIENCY VIRUS
DYWQATWIPEW

SEQ ID NO: 4804 - protein, 11 aa, HUMAN IMMUNODEFICIENCY VIRUS
EYWQATWIPEW

SEQ ID NO: 4805 - protein, 11 aa, HUMAN IMMUNODEFICIENCY VIRUS
EFVNTPPLVKL

SEQ ID NO: 4806 - protein, 11 aa, HUMAN IMMUNODEFICIENCY VIRUS
FVNTPPLVKLW

SEQ ID NO: 4807 - protein, 11 aa, HUMAN IMMUNODEFICIENCY VIRUS
KLWYQLEKDPI

SEQ ID NO: 4808 - protein, 11 aa, HUMAN IMMUNODEFICIENCY VIRUS
KLWYQLEKEPI

SEQ ID NO: 4809 - protein, 11 aa, HUMAN IMMUNODEFICIENCY VIRUS
KLWYQLETEPI

SEQ ID NO: 4810 - protein, 11 aa, HUMAN IMMUNODEFICIENCY VIRUS
LTDTTNQKTEL

SEQ ID NO: 4811 - protein, 11 aa, HUMAN IMMUNODEFICIENCY VIRUS
LTETTNQKTEL

SEQ ID NO: 4812 - protein, 11 aa, HUMAN IMMUNODEFICIENCY VIRUS
TTNQKTELHAI

SEQ ID NO: 4813 - protein, 11 aa, HUMAN IMMUNODEFICIENCY VIRUS
TTNQKTELQAI

SEQ ID NO: 4814 - protein, 11 aa, HUMAN IMMUNODEFICIENCY VIRUS
KTELQAIHLAL

SEQ ID NO: 4815 - protein, 11 aa, HUMAN IMMUNODEFICIENCY VIRUS
KTELQAIYLAL

SEQ ID NO: 4816 - protein, 11 aa, HUMAN IMMUNODEFICIENCY VIRUS
AIHLALQDSGL

SEQ ID NO: 4817 - protein, 11 aa, HUMAN IMMUNODEFICIENCY VIRUS
ALQDSGLEVNI

SEQ ID NO: 4818 - protein, 11 aa, HUMAN IMMUNODEFICIENCY VIRUS
ALQDSGSEVNI

SEQ ID NO: 4819 - protein, 11 aa, HUMAN IMMUNODEFICIENCY VIRUS
IVTDSQYALGI

SEQ ID NO: 4820 - protein, 11 aa, HUMAN IMMUNODEFICIENCY VIRUS
VTDSQYALGII

SEQ ID NO: 4821 - protein, 11 aa, HUMAN IMMUNODEFICIENCY VIRUS
ELVNQIIEQLI

SEQ ID NO: 4822 - protein, 11 aa, HUMAN IMMUNODEFICIENCY VIRUS
ELVSQIIEQLI

SEQ ID NO: 4823 - protein, 11 aa, HUMAN IMMUNODEFICIENCY VIRUS
LIKKEKVYLAW

SEQ ID NO: 4824 - protein, 11 aa, HUMAN IMMUNODEFICIENCY VIRUS
LIKKEKVYLSW

SEQ ID NO: 4825 - protein, 11 aa, HUMAN IMMUNODEFICIENCY VIRUS
YLAWVPAHKGI

SEQ ID NO: 4826 - protein, 11 aa, HUMAN IMMUNODEFICIENCY VIRUS
YLSWVPAHKGI

SEQ ID NO: 4827 - protein, 11 aa, HUMAN IMMUNODEFICIENCY VIRUS
GIGGNEQVDKL

SEQ ID NO: 4828 - protein, 11 aa, HUMAN IMMUNODEFICIENCY VIRUS
KLVSAGIRKVL

SEQ ID NO: 4829 - protein, 11 aa, HUMAN IMMUNODEFICIENCY VIRUS
KLVSSGIRKVL

SEQ ID NO: 4830 - protein, 11 aa, HUMAN IMMUNODEFICIENCY VIRUS
LVSAGIRKVLF

SEQ ID NO: 4831 - protein, 11 aa, HUMAN IMMUNODEFICIENCY VIRUS
LVSSGIRKVLF

SEQ ID NO: 4832 - protein, 11 aa, HUMAN IMMUNODEFICIENCY VIRUS
GIRKVLFLDGI

SEQ ID NO: 4833 - protein, 11 aa, HUMAN IMMUNODEFICIENCY VIRUS
NWRAMASDFNL

SEQ ID NO: 4834 - protein, 11 aa, HUMAN IMMUNODEFICIENCY VIRUS
AMASDFNLPPI

SEQ ID NO: 4835 - protein, 11 aa, HUMAN IMMUNODEFICIENCY VIRUS
EIVASCDKCQL

SEQ ID NO: 4836 - protein, 11 aa, HUMAN IMMUNODEFICIENCY VIRUS
QVDCSPGIWQL

SEQ ID NO: 4837 - protein, 11 aa, HUMAN IMMUNODEFICIENCY VIRUS
QLDCTHLEGKI

SEQ ID NO: 4838 - protein, 11 aa, HUMAN IMMUNODEFICIENCY VIRUS
ILVAVHVASGY

SEQ ID NO: 4839 - protein, 11 aa, HUMAN IMMUNODEFICIENCY VIRUS
LVAVHVASGYI

SEQ ID NO: 4840 - protein, 11 aa, HUMAN IMMUNODEFICIENCY VIRUS
ETGQETAYFIL

SEQ ID NO: 4841 - protein, 11 aa, HUMAN IMMUNODEFICIENCY VIRUS
ETGQETAYFLL

SEQ ID NO: 4842 - protein, 11 aa, HUMAN IMMUNODEFICIENCY VIRUS
AYFILKLAGRW

SEQ ID NO: 4843 - protein, 11 aa, HUMAN IMMUNODEFICIENCY VIRUS
AYFLLKLAGRW

SEQ ID NO: 4844 - protein, 11 aa, HUMAN IMMUNODEFICIENCY VIRUS
KLAGRWPVKTI

SEQ ID NO: 4845 - protein, 11 aa, HUMAN IMMUNODEFICIENCY VIRUS
KLAGRWPVKVI

SEQ ID NO: 4846 - protein, 11 aa, HUMAN IMMUNODEFICIENCY VIRUS
KVIHTDNGSNF

SEQ ID NO: 4847 - protein, 11 aa, HUMAN IMMUNODEFICIENCY VIRUS
FTSAAVKAACW

SEQ ID NO: 4848 - protein, 11 aa, HUMAN IMMUNODEFICIENCY VIRUS
FTSTTVKAACW

SEQ ID NO: 4849 - protein, 11 aa, HUMAN IMMUNODEFICIENCY VIRUS
AVKAACWWAGI

SEQ ID NO: 4850 - protein, 11 aa, HUMAN IMMUNODEFICIENCY VIRUS
TVKAACWWAGI

SEQ ID NO: 4851 - protein, 11 aa, HUMAN IMMUNODEFICIENCY VIRUS
WWAGIKQEFGI

SEQ ID NO: 4852 - protein, 11 aa, HUMAN IMMUNODEFICIENCY VIRUS
WWAGIQQEFGI

SEQ ID NO: 4853 - protein, 11 aa, HUMAN IMMUNODEFICIENCY VIRUS
HLKTAVQMAVF

SEQ ID NO: 4854 - protein, 11 aa, HUMAN IMMUNODEFICIENCY VIRUS
AVQMAVFIHNF

SEQ ID NO: 4855 - protein, 11 aa, HUMAN IMMUNODEFICIENCY VIRUS
FIHNFKRKGGI

SEQ ID NO: 4856 - protein, 11 aa, HUMAN IMMUNODEFICIENCY VIRUS
NFKRKGGIGGY

SEQ ID NO: 4857 - protein, 11 aa, HUMAN IMMUNODEFICIENCY VIRUS
GIGGYSAGERI

SEQ ID NO: 4858 - protein, 11 aa, HUMAN IMMUNODEFICIENCY VIRUS
GYSAGERIIDI

SEQ ID NO: 4859 - protein, 11 aa, HUMAN IMMUNODEFICIENCY VIRUS
GYSAGERIVDI

SEQ ID NO: 4860 - protein, 11 aa, HUMAN IMMUNODEFICIENCY VIRUS
IIASDIQTKEL

SEQ ID NO: 4861 - protein, 11 aa, HUMAN IMMUNODEFICIENCY VIRUS
IIATDIQTKEL

SEQ ID NO: 4862 - protein, 11 aa, HUMAN IMMUNODEFICIENCY VIRUS
DIQTKELQKQI

SEQ ID NO: 4863 - protein, 11 aa, HUMAN IMMUNODEFICIENCY VIRUS
QIIKIQNFRVY

SEQ ID NO: 4864 - protein, 11 aa, HUMAN IMMUNODEFICIENCY VIRUS
QITKIQNFRVY

SEQ ID NO: 4865 - protein, 11 aa, HUMAN IMMUNODEFICIENCY VIRUS
IIKIQNFRVYY

SEQ ID NO: 4866 - protein, 11 aa, HUMAN IMMUNODEFICIENCY VIRUS
ITKIQNFRVYY

SEQ ID NO: 4867 - protein, 11 aa, HUMAN IMMUNODEFICIENCY VIRUS
RVYYRDSRDPI

SEQ ID NO: 4868 - protein, 11 aa, HUMAN IMMUNODEFICIENCY VIRUS
RVYYRDSRDPL

SEQ ID NO: 4869 - protein, 11 aa, HUMAN IMMUNODEFICIENCY VIRUS
VYYRDSRDPIW

SEQ ID NO: 4870 - protein, 11 aa, HUMAN IMMUNODEFICIENCY VIRUS
VYYRDSRDPLW

SEQ ID NO: 4871 - protein, 11 aa, HUMAN IMMUNODEFICIENCY VIRUS
PIWKGPAKLLW

SEQ ID NO: 4872 - protein, 11 aa, HUMAN IMMUNODEFICIENCY VIRUS
PLWKGPAKLLW

SEQ ID NO: 4873 - protein, 11 aa, HUMAN IMMUNODEFICIENCY VIRUS
LLWKGEGAVVI

SEQ ID NO: 4874 - protein, 11 aa, HUMAN IMMUNODEFICIENCY VIRUS
KVVPRRKAKII

SEQ ID NO: 4875 - protein, 11 aa, HUMAN IMMUNODEFICIENCY VIRUS
KVVPRRKVKII

SEQ ID NO: 4876 - protein, 8 aa, HUMAN IMMUNODEFICIENCY VIRUS
LLKTVRLI

SEQ ID NO: 4877 - protein, 8 aa, HUMAN IMMUNODEFICIENCY VIRUS
AVRIIKIL

SEQ ID NO: 4878 - protein, 8 aa, HUMAN IMMUNODEFICIENCY VIRUS
ILYQSNPY

SEQ ID NO: 4879 - protein, 8 aa, HUMAN IMMUNODEFICIENCY VIRUS
QLPPIERL

SEQ ID NO: 4880 - protein, 8 aa, HUMAN IMMUNODEFICIENCY VIRUS
QLPPLERL

SEQ ID NO: 4881 - protein, 8 aa, HUMAN IMMUNODEFICIENCY VIRUS
LVESPAVL

SEQ ID NO: 4882 - protein, 9 aa, HUMAN IMMUNODEFICIENCY VIRUS
AVRIIKILY

SEQ ID NO: 4883 - protein, 9 aa, HUMAN IMMUNODEFICIENCY VIRUS
KILYQSNPY

SEQ ID NO: 4884 - protein, 9 aa, HUMAN IMMUNODEFICIENCY VIRUS
RWRARQRQI

SEQ ID NO: 4885 - protein, 9 aa, HUMAN IMMUNODEFICIENCY VIRUS
RWRERQRQI

SEQ ID NO: 4886 - protein, 9 aa, HUMAN IMMUNODEFICIENCY VIRUS
PVPLQLPPI

SEQ ID NO: 4887 - protein, 9 aa, HUMAN IMMUNODEFICIENCY VIRUS
PVPLQLPPL

SEQ ID NO: 4888 - protein, 10 aa, HUMAN IMMUNODEFICIENCY VIRUS
PLQLPPIERL

SEQ ID NO: 4889 - protein, 10 aa, HUMAN IMMUNODEFICIENCY VIRUS
PLQLPPLERL

SEQ ID NO: 4890 - protein, 10 aa, HUMAN IMMUNODEFICIENCY VIRUS
QLPPLERLTL

SEQ ID NO: 4891 - protein, 10 aa, HUMAN IMMUNODEFICIENCY VIRUS
GTQGVGSPQI

SEQ ID NO: 4892 - protein, 11 aa, HUMAN IMMUNODEFICIENCY VIRUS
IIKILYQSNPY

SEQ ID NO: 4893 - protein, 8 aa, HUMAN IMMUNODEFICIENCY VIRUS
CYCKKCCF

SEQ ID NO: 4894 - protein, 8 aa, HUMAN IMMUNODEFICIENCY VIRUS
CYCKKCCY

SEQ ID NO: 4895 - protein, 8 aa, HUMAN IMMUNODEFICIENCY VIRUS
CFHCQVCF

SEQ ID NO: 4896 - protein, 8 aa, HUMAN IMMUNODEFICIENCY VIRUS
FLNKGLGI

SEQ ID NO: 4897 - protein, 9 aa, HUMAN IMMUNODEFICIENCY VIRUS
PVDPNLEPW

SEQ ID NO: 4898 - protein, 9 aa, HUMAN IMMUNODEFICIENCY VIRUS
PVDPRLEPW

SEQ ID NO: 4899 - protein, 9 aa, HUMAN IMMUNODEFICIENCY VIRUS
CFLNKGLGI

SEQ ID NO: 4900 - protein, 10 aa, HUMAN IMMUNODEFICIENCY VIRUS
FLNKGLGISY

SEQ ID NO: 4901 - protein, 11 aa, HUMAN IMMUNODEFICIENCY VIRUS
CFLNKGLGISY

SEQ ID NO: 4902 - protein, 8 aa, HUMAN IMMUNODEFICIENCY VIRUS
RWQVLIVW

SEQ ID NO: 4903 - protein, 8 aa, HUMAN IMMUNODEFICIENCY VIRUS
RWQVMIVW

SEQ ID NO: 4904 - protein, 8 aa, HUMAN IMMUNODEFICIENCY VIRUS
IVWQVDRM

SEQ ID NO: 4905 - protein, 8 aa, HUMAN IMMUNODEFICIENCY VIRUS
KIRTWNSL

SEQ ID NO: 4906 - protein, 8 aa, HUMAN IMMUNODEFICIENCY VIRUS
RIRTWKSL

SEQ ID NO: 4907 - protein, 8 aa, HUMAN IMMUNODEFICIENCY VIRUS
RIRTWNSL

SEQ ID NO: 4908 - protein, 8 aa, HUMAN IMMUNODEFICIENCY VIRUS
SLVKHHMY

SEQ ID NO: 4909 - protein, 8 aa, HUMAN IMMUNODEFICIENCY VIRUS
LVKHHMYI

SEQ ID NO: 4910 - protein, 8 aa, HUMAN IMMUNODEFICIENCY VIRUS
GWFYRHHY

SEQ ID NO: 4911 - protein, 8 aa, HUMAN IMMUNODEFICIENCY VIRUS
KISSEVHI

SEQ ID NO: 4912 - protein, 8 aa, HUMAN IMMUNODEFICIENCY VIRUS
KVSSEVHI

SEQ ID NO: 4913 - protein, 8 aa, HUMAN IMMUNODEFICIENCY VIRUS
RISSEVHI

SEQ ID NO: 4914 - protein, 8 aa, HUMAN IMMUNODEFICIENCY VIRUS
RLVITTYW

SEQ ID NO: 4915 - protein, 8 aa, HUMAN IMMUNODEFICIENCY VIRUS
VIKTYWGL

SEQ ID NO: 4916 - protein, 8 aa, HUMAN IMMUNODEFICIENCY VIRUS
VITTYWGL

SEQ ID NO: 4917 - protein, 8 aa, HUMAN IMMUNODEFICIENCY VIRUS
VVRTYWGL

SEQ ID NO: 4918 - protein, 8 aa, HUMAN IMMUNODEFICIENCY VIRUS
VVTTYWGL

SEQ ID NO: 4919 - protein, 8 aa, HUMAN IMMUNODEFICIENCY VIRUS
HLGHGVSI

SEQ ID NO: 4920 - protein, 8 aa, HUMAN IMMUNODEFICIENCY VIRUS
HLGQGVSI

SEQ ID NO: 4921 - protein, 8 aa, HUMAN IMMUNODEFICIENCY VIRUS
GVSIEWRL

SEQ ID NO: 4922 - protein, 8 aa, HUMAN IMMUNODEFICIENCY VIRUS
STQIDPDL

SEQ ID NO: 4923 - protein, 8 aa, HUMAN IMMUNODEFICIENCY VIRUS
STQVDPGL

SEQ ID NO: 4924 - protein, 8 aa, HUMAN IMMUNODEFICIENCY VIRUS
QLIHLYYF

SEQ ID NO: 4925 - protein, 8 aa, HUMAN IMMUNODEFICIENCY VIRUS
QLIHMHYF

SEQ ID NO: 4926 - protein, 8 aa, HUMAN IMMUNODEFICIENCY VIRUS
HLYYFDCF

SEQ ID NO: 4927 - protein, 8 aa, HUMAN IMMUNODEFICIENCY VIRUS
HMHYFDCF

SEQ ID NO: 4928 - protein, 8 aa, HUMAN IMMUNODEFICIENCY VIRUS
IVSPRCEY

SEQ ID NO: 4929 - protein, 8 aa, HUMAN IMMUNODEFICIENCY VIRUS
KVGSLQYL

SEQ ID NO: 4930 - protein, 8 aa, HUMAN IMMUNODEFICIENCY VIRUS
QYLALAAL

SEQ ID NO: 4931 - protein, 8 aa, HUMAN IMMUNODEFICIENCY VIRUS
QYLALKAL

SEQ ID NO: 4932 - protein, 8 aa, HUMAN IMMUNODEFICIENCY VIRUS
QYLALTAL

SEQ ID NO: 4933 - protein, 8 aa, HUMAN IMMUNODEFICIENCY VIRUS
YLALTALI

SEQ ID NO: 4934 - protein, 8 aa, HUMAN IMMUNODEFICIENCY VIRUS
ALIKPKKI

SEQ ID NO: 4935 - protein, 8 aa, HUMAN IMMUNODEFICIENCY VIRUS
PLPSVKKL

SEQ ID NO: 4936 - protein, 8 aa, HUMAN IMMUNODEFICIENCY VIRUS
PLPSVRKL

SEQ ID NO: 4937 - protein, 9 aa, HUMAN IMMUNODEFICIENCY VIRUS
MIVWQVDRM

SEQ ID NO: 4938 - protein, 9 aa, HUMAN IMMUNODEFICIENCY VIRUS
VWQVDRMKI

SEQ ID NO: 4939 - protein, 9 aa, HUMAN IMMUNODEFICIENCY VIRUS
VWQVDRMRI

SEQ ID NO: 4940 - protein, 9 aa, HUMAN IMMUNODEFICIENCY VIRUS
SLVKHHMYI

SEQ ID NO: 4941 - protein, 9 aa, HUMAN IMMUNODEFICIENCY VIRUS
HIPLGDARL

SEQ ID NO: 4942 - protein, 9 aa, HUMAN IMMUNODEFICIENCY VIRUS
HIPLGEARL

SEQ ID NO: 4943 - protein, 9 aa, HUMAN IMMUNODEFICIENCY VIRUS
PLGEARLVI

SEQ ID NO: 4944 - protein, 9 aa, HUMAN IMMUNODEFICIENCY VIRUS
LVIKTYWGL

SEQ ID NO: 4945 - protein, 9 aa, HUMAN IMMUNODEFICIENCY VIRUS
LVITTYWGL

SEQ ID NO: 4946 - protein, 9 aa, HUMAN IMMUNODEFICIENCY VIRUS
GLHTGERDW

SEQ ID NO: 4947 - protein, 9 aa, HUMAN IMMUNODEFICIENCY VIRUS
GLQTGERDW

SEQ ID NO: 4948 - protein, 9 aa, HUMAN IMMUNODEFICIENCY VIRUS
HTGERDWHL

SEQ ID NO: 4949 - protein, 9 aa, HUMAN IMMUNODEFICIENCY VIRUS
QTGERDWHL

SEQ ID NO: 4950 - protein, 9 aa, HUMAN IMMUNODEFICIENCY VIRUS
SIEWRLRRY

SEQ ID NO: 4951 - protein, 9 aa, HUMAN IMMUNODEFICIENCY VIRUS
DLADQLIHL

SEQ ID NO: 4952 - protein, 9 aa, HUMAN IMMUNODEFICIENCY VIRUS
GLADQLIHM

SEQ ID NO: 4953 - protein, 9 aa, HUMAN IMMUNODEFICIENCY VIRUS
QYLALTALI

SEQ ID NO: 4954 - protein, 10 aa, HUMAN IMMUNODEFICIENCY VIRUS
VMIVWQVDRM

SEQ ID NO: 4955 - protein, 10 aa, HUMAN IMMUNODEFICIENCY VIRUS
IVWQVDRMKI

SEQ ID NO: 4956 - protein, 10 aa, HUMAN IMMUNODEFICIENCY VIRUS
IVWQVDRMRI

SEQ ID NO: 4957 - protein, 10 aa, HUMAN IMMUNODEFICIENCY VIRUS
QVDRMKIRTW

SEQ ID NO: 4958 - protein, 10 aa, HUMAN IMMUNODEFICIENCY VIRUS
QVDRMRINTW

SEQ ID NO: 4959 - protein, 10 aa, HUMAN IMMUNODEFICIENCY VIRUS
QVDRMRIRTW

SEQ ID NO: 4960 - protein, 10 aa, HUMAN IMMUNODEFICIENCY VIRUS
RMKIRTWNSL

SEQ ID NO: 4961 - protein, 10 aa, HUMAN IMMUNODEFICIENCY VIRUS
RMRIRTWKSL

SEQ ID NO: 4962 - protein, 10 aa, HUMAN IMMUNODEFICIENCY VIRUS
RMRIRTWNSL

SEQ ID NO: 4963 - protein, 10 aa, HUMAN IMMUNODEFICIENCY VIRUS
TWKSLVKHHM

SEQ ID NO: 4964 - protein, 10 aa, HUMAN IMMUNODEFICIENCY VIRUS
TWNSLVKHHM

SEQ ID NO: 4965 - protein, 10 aa, HUMAN IMMUNODEFICIENCY VIRUS
KISSEVHIPL

SEQ ID NO: 4966 - protein, 10 aa, HUMAN IMMUNODEFICIENCY VIRUS
KVSSEVHIPL

SEQ ID NO: 4967 - protein, 10 aa, HUMAN IMMUNODEFICIENCY VIRUS
RISSEVHIPL

SEQ ID NO: 4968 - protein, 10 aa, HUMAN IMMUNODEFICIENCY VIRUS
RLVITTYWGL

SEQ ID NO: 4969 - protein, 10 aa, HUMAN IMMUNODEFICIENCY VIRUS
DWHLGHGVSI

SEQ ID NO: 4970 - protein, 10 aa, HUMAN IMMUNODEFICIENCY VIRUS
DWHLGQGVSI

SEQ ID NO: 4971 - protein, 10 aa, HUMAN IMMUNODEFICIENCY VIRUS
HLGHGVSIEW

SEQ ID NO: 4972 - protein, 10 aa, HUMAN IMMUNODEFICIENCY VIRUS
HLGQGVSIEW

SEQ ID NO: 4973 - protein, 10 aa, HUMAN IMMUNODEFICIENCY VIRUS
RYSTQVDPGL

SEQ ID NO: 4974 - protein, 10 aa, HUMAN IMMUNODEFICIENCY VIRUS
QIDPDLADQL

SEQ ID NO: 4975 - protein, 10 aa, HUMAN IMMUNODEFICIENCY VIRUS
QVDPGLADQL

SEQ ID NO: 4976 - protein, 10 aa, HUMAN IMMUNODEFICIENCY VIRUS
LIHLYYFDCF

SEQ ID NO: 4977 - protein, 10 aa, HUMAN IMMUNODEFICIENCY VIRUS
LIHMHYFDCF

SEQ ID NO: 4978 - protein, 10 aa, HUMAN IMMUNODEFICIENCY VIRUS
YFDCFSESAI

SEQ ID NO: 4979 - protein, 10 aa, HUMAN IMMUNODEFICIENCY VIRUS
KVGSLQYLAL

SEQ ID NO: 4980 - protein, 10 aa, HUMAN IMMUNODEFICIENCY VIRUS
SLQYLALAAL

SEQ ID NO: 4981 - protein, 10 aa, HUMAN IMMUNODEFICIENCY VIRUS
SLQYLALKAL

SEQ ID NO: 4982 - protein, 10 aa, HUMAN IMMUNODEFICIENCY VIRUS
SLQYLALTAL

SEQ ID NO: 4983 - protein, 10 aa, HUMAN IMMUNODEFICIENCY VIRUS
SVKKLTEDRW

SEQ ID NO: 4984 - protein, 11 aa, HUMAN IMMUNODEFICIENCY VIRUS
QVMIVWQVDRM

SEQ ID NO: 4985 - protein, 11 aa, HUMAN IMMUNODEFICIENCY VIRUS
MIVWQVDRMRI

SEQ ID NO: 4986 - protein, 11 aa, HUMAN IMMUNODEFICIENCY VIRUS
RTWKSLVKHHM

SEQ ID NO: 4987 - protein, 11 aa, HUMAN IMMUNODEFICIENCY VIRUS
RTWNSLVKHHM

SEQ ID NO: 4988 - protein, 11 aa, HUMAN IMMUNODEFICIENCY VIRUS
TWKSLVKHHMY

SEQ ID NO: 4989 - protein, 11 aa, HUMAN IMMUNODEFICIENCY VIRUS
TWNSLVKHHMY

SEQ ID NO: 4990 - protein, 11 aa, HUMAN IMMUNODEFICIENCY VIRUS
EVHIPLGDARL

SEQ ID NO: 4991 - protein, 11 aa, HUMAN IMMUNODEFICIENCY VIRUS
EVHIPLGEARL

SEQ ID NO: 4992 - protein, 11 aa, HUMAN IMMUNODEFICIENCY VIRUS
HIPLGEARLVI

SEQ ID NO: 4993 - protein, 11 aa, HUMAN IMMUNODEFICIENCY VIRUS
YWGLHTGERDW

SEQ ID NO: 4994 - protein, 11 aa, HUMAN IMMUNODEFICIENCY VIRUS
YWGLQTGERDW

SEQ ID NO: 4995 - protein, 11 aa, HUMAN IMMUNODEFICIENCY VIRUS
GLHTGERDWHL

SEQ ID NO: 4996 - protein, 11 aa, HUMAN IMMUNODEFICIENCY VIRUS
GLQTGERDWHL

SEQ ID NO: 4997 - protein, 11 aa, HUMAN IMMUNODEFICIENCY VIRUS
GVSIEWRLRRY

SEQ ID NO: 4998 - protein, 11 aa, HUMAN IMMUNODEFICIENCY VIRUS
QIDPDLADQLI

SEQ ID NO: 4999 - protein, 11 aa, HUMAN IMMUNODEFICIENCY VIRUS
QVDPGLADQLI

SEQ ID NO: 5000 - protein, 11 aa, HUMAN IMMUNODEFICIENCY VIRUS
GLADQLIHMHY

SEQ ID NO: 5001 - protein, 11 aa, HUMAN IMMUNODEFICIENCY VIRUS
QLIHLYYFDCF

SEQ ID NO: 5002 - protein, 11 aa, HUMAN IMMUNODEFICIENCY VIRUS
QLIHMHYFDCF

SEQ ID NO: 5003 - protein, 11 aa, HUMAN IMMUNODEFICIENCY VIRUS
YYFDCFSESAI

SEQ ID NO: 5004 - protein, 11 aa, HUMAN IMMUNODEFICIENCY VIRUS
CFSDSAIRKAI

SEQ ID NO: 5005 - protein, 11 aa, HUMAN IMMUNODEFICIENCY VIRUS
CFSESAIRKAI

SEQ ID NO: 5006 - protein, 11 aa, HUMAN IMMUNODEFICIENCY VIRUS
CFSESAIRNAI

SEQ ID NO: 5007 - protein, 11 aa, HUMAN IMMUNODEFICIENCY VIRUS
SLQYLALTALI

SEQ ID NO: 5008 - protein, 11 aa, HUMAN IMMUNODEFICIENCY VIRUS
LIKPKKIKPPL

SEQ ID NO: 5009 - protein, 11 aa, HUMAN IMMUNODEFICIENCY VIRUS
KTKGHRGSHTM

SEQ ID NO: 5010 - protein, 8 aa, HUMAN IMMUNODEFICIENCY VIRUS
ALELLEEL

SEQ ID NO: 5011 - protein, 8 aa, HUMAN IMMUNODEFICIENCY VIRUS
TLELLEEL

SEQ ID NO: 5012 - protein, 8 aa, HUMAN IMMUNODEFICIENCY VIRUS
AVRHFPRI

SEQ ID NO: 5013 - protein, 8 aa, HUMAN IMMUNODEFICIENCY VIRUS
WLHGLGQY

SEQ ID NO: 5014 - protein, 8 aa, HUMAN IMMUNODEFICIENCY VIRUS
TWAGVEAI

SEQ ID NO: 5015 - protein, 8 aa, HUMAN IMMUNODEFICIENCY VIRUS
TWEGVEAI

SEQ ID NO: 5016 - protein, 8 aa, HUMAN IMMUNODEFICIENCY VIRUS
GVEAIIRI

SEQ ID NO: 5017 - protein, 8 aa, HUMAN IMMUNODEFICIENCY VIRUS
IIRILQQL

SEQ ID NO: 5018 - protein, 8 aa, HUMAN IMMUNODEFICIENCY VIRUS
RILQQLLF

SEQ ID NO: 5019 - protein, 8 aa, HUMAN IMMUNODEFICIENCY VIRUS
ILQQLLFI

SEQ ID NO: 5020 - protein, 8 aa, HUMAN IMMUNODEFICIENCY VIRUS
LLFIHFRI

SEQ ID NO: 5021 - protein, 8 aa, HUMAN IMMUNODEFICIENCY VIRUS
LLFVHFRI

SEQ ID NO: 5022 - protein, 9 aa, HUMAN IMMUNODEFICIENCY VIRUS
PYNEWTLEL

SEQ ID NO: 5023 - protein, 9 aa, HUMAN IMMUNODEFICIENCY VIRUS
WTLELLEEL

SEQ ID NO: 5024 - protein, 9 aa, HUMAN IMMUNODEFICIENCY VIRUS
AVRHFPRIW

SEQ ID NO: 5025 - protein, 9 aa, HUMAN IMMUNODEFICIENCY VIRUS
AVRHFPRPW

SEQ ID NO: 5026 - protein, 9 aa, HUMAN IMMUNODEFICIENCY VIRUS
PWLHGLGQY

SEQ ID NO: 5027 - protein, 9 aa, HUMAN IMMUNODEFICIENCY VIRUS
WLHGLGQHI

SEQ ID NO: 5028 - protein, 9 aa, HUMAN IMMUNODEFICIENCY VIRUS
IYETYGDTW

SEQ ID NO: 5029 - protein, 9 aa, HUMAN IMMUNODEFICIENCY VIRUS
IYNTYGDTW

SEQ ID NO: 5030 - protein, 9 aa, HUMAN IMMUNODEFICIENCY VIRUS
DTWAGVEAI

SEQ ID NO: 5031 - protein, 9 aa, HUMAN IMMUNODEFICIENCY VIRUS
DTWEGVEAI

SEQ ID NO: 5032 - protein, 9 aa, HUMAN IMMUNODEFICIENCY VIRUS
TWAGVEAII

SEQ ID NO: 5033 - protein, 9 aa, HUMAN IMMUNODEFICIENCY VIRUS
TWEGVEAII

SEQ ID NO: 5034 - protein, 9 aa, HUMAN IMMUNODEFICIENCY VIRUS
GVEAIIRIL

SEQ ID NO: 5035 - protein, 9 aa, HUMAN IMMUNODEFICIENCY VIRUS
AIIRILQQL

SEQ ID NO: 5036 - protein, 9 aa, HUMAN IMMUNODEFICIENCY VIRUS
IIRILQQLL

SEQ ID NO: 5037 - protein, 9 aa, HUMAN IMMUNODEFICIENCY VIRUS
RILQQLLFI

SEQ ID NO: 5038 - protein, 9 aa, HUMAN IMMUNODEFICIENCY VIRUS
QLLFIHFRI

SEQ ID NO: 5039 - protein, 9 aa, HUMAN IMMUNODEFICIENCY VIRUS
QLLFVHFRI

SEQ ID NO: 5040 - protein, 9 aa, HUMAN IMMUNODEFICIENCY VIRUS
RIGCQHSRI

SEQ ID NO: 5041 - protein, 9 aa, HUMAN IMMUNODEFICIENCY VIRUS
RIGCRHSRI

SEQ ID NO: 5042 - protein, 10 aa, HUMAN IMMUNODEFICIENCY VIRUS
PYNEWTLELL

SEQ ID NO: 5043 - protein, 10 aa, HUMAN IMMUNODEFICIENCY VIRUS
EWTLELLEEL

SEQ ID NO: 5044 - protein, 10 aa, HUMAN IMMUNODEFICIENCY VIRUS
ELKNEAVRHF

SEQ ID NO: 5045 - protein, 10 aa, HUMAN IMMUNODEFICIENCY VIRUS
ELKSEAVRHF

SEQ ID NO: 5046 - protein, 10 aa, HUMAN IMMUNODEFICIENCY VIRUS
AVRHFPRIWL

SEQ ID NO: 5047 - protein, 10 aa, HUMAN IMMUNODEFICIENCY VIRUS
AVRHFPRPWL

SEQ ID NO: 5048 - protein, 10 aa, HUMAN IMMUNODEFICIENCY VIRUS
HFPRIWLHSL

SEQ ID NO: 5049 - protein, 10 aa, HUMAN IMMUNODEFICIENCY VIRUS
HFPRPWLHGL

SEQ ID NO: 5050 - protein, 10 aa, HUMAN IMMUNODEFICIENCY VIRUS
PWLHGLGQHI

SEQ ID NO: 5051 - protein, 10 aa, HUMAN IMMUNODEFICIENCY VIRUS
WLHGLGQHIY

SEQ ID NO: 5052 - protein, 10 aa, HUMAN IMMUNODEFICIENCY VIRUS
HIYETYGDTW

SEQ ID NO: 5053 - protein, 10 aa, HUMAN IMMUNODEFICIENCY VIRUS
HIYNTYGDTW

SEQ ID NO: 5054 - protein, 10 aa, HUMAN IMMUNODEFICIENCY VIRUS
YIYETYGDTW

SEQ ID NO: 5055 - protein, 10 aa, HUMAN IMMUNODEFICIENCY VIRUS
DTWAGVEAII

SEQ ID NO: 5056 - protein, 10 aa, HUMAN IMMUNODEFICIENCY VIRUS
DTWEGVEAII

SEQ ID NO: 5057 - protein, 10 aa, HUMAN IMMUNODEFICIENCY VIRUS
AIIRILQQLL

SEQ ID NO: 5058 - protein, 10 aa, HUMAN IMMUNODEFICIENCY VIRUS
IIRILQQLLF

SEQ ID NO: 5059 - protein, 10 aa, HUMAN IMMUNODEFICIENCY VIRUS
ILQQLLFIHF

SEQ ID NO: 5060 - protein, 11 aa, HUMAN IMMUNODEFICIENCY VIRUS
PWLHGLGQHIY

SEQ ID NO: 5061 - protein, 11 aa, HUMAN IMMUNODEFICIENCY VIRUS
QYIYETYGDTW

SEQ ID NO: 5062 - protein, 11 aa, HUMAN IMMUNODEFICIENCY VIRUS
TWAGVEAIIRI

SEQ ID NO: 5063 - protein, 11 aa, HUMAN IMMUNODEFICIENCY VIRUS
TWEGVEAIIRI

SEQ ID NO: 5064 - protein, 11 aa, HUMAN IMMUNODEFICIENCY VIRUS
AIIRILQQLLF

SEQ ID NO: 5065 - protein, 11 aa, HUMAN IMMUNODEFICIENCY VIRUS
IIRILQQLLFI

SEQ ID NO: 5066 - protein, 11 aa, HUMAN IMMUNODEFICIENCY VIRUS
RILQQLLFIHF

SEQ ID NO: 5067 - protein, 11 aa, HUMAN IMMUNODEFICIENCY VIRUS
HFRIGCQHSRI

SEQ ID NO: 5068 - protein, 11 aa, HUMAN IMMUNODEFICIENCY VIRUS
HFRIGCRHSRI

SEQ ID NO: 5069 - protein, 11 aa, HUMAN IMMUNODEFICIENCY VIRUS
RIGCQHSRIGI

SEQ ID NO: 5070 - protein, 11 aa, HUMAN IMMUNODEFICIENCY VIRUS
RIGCRHSRIGI

SEQ ID NO: 5071 - protein, 8 aa, HUMAN IMMUNODEFICIENCY VIRUS
KVDYRIVI

SEQ ID NO: 5072 - protein, 8 aa, HUMAN IMMUNODEFICIENCY VIRUS
LIIAIVVW

SEQ ID NO: 5073 - protein, 8 aa, HUMAN IMMUNODEFICIENCY VIRUS
IVVWTIVF

SEQ ID NO: 5074 - protein, 8 aa, HUMAN IMMUNODEFICIENCY VIRUS
VVWTIVFI

SEQ ID NO: 5075 - protein, 8 aa, HUMAN IMMUNODEFICIENCY VIRUS
WTIVFIEY

SEQ ID NO: 5076 - protein, 8 aa, HUMAN IMMUNODEFICIENCY VIRUS
VFIEYRKI

SEQ ID NO: 5077 - protein, 8 aa, HUMAN IMMUNODEFICIENCY VIRUS
KILRQRKI

SEQ ID NO: 5078 - protein, 8 aa, HUMAN IMMUNODEFICIENCY VIRUS
EMGHHAPW

SEQ ID NO: 5079 - protein, 9 aa, HUMAN IMMUNODEFICIENCY VIRUS
NYELAVGAL

SEQ ID NO: 5080 - protein, 9 aa, HUMAN IMMUNODEFICIENCY VIRUS
DYKLGVGAL

SEQ ID NO: 5081 - protein, 9 aa, HUMAN IMMUNODEFICIENCY VIRUS
DYRLGVGAL

SEQ ID NO: 5082 - protein, 9 aa, HUMAN IMMUNODEFICIENCY VIRUS
IIAIVVWTI

SEQ ID NO: 5083 - protein, 9 aa, HUMAN IMMUNODEFICIENCY VIRUS
AIVVWTIVF

SEQ ID NO: 5084 - protein, 9 aa, HUMAN IMMUNODEFICIENCY VIRUS
IVVWTIVFI

SEQ ID NO: 5085 - protein, 9 aa, HUMAN IMMUNODEFICIENCY VIRUS
VWTIVFIEY

SEQ ID NO: 5086 - protein, 9 aa, HUMAN IMMUNODEFICIENCY VIRUS
IVFIEYRKI

SEQ ID NO: 5087 - protein, 9 aa, HUMAN IMMUNODEFICIENCY VIRUS
KIDRLIDRI

SEQ ID NO: 5088 - protein, 9 aa, HUMAN IMMUNODEFICIENCY VIRUS
VTLLSSSKL

SEQ ID NO: 5089 - protein, 10 aa, HUMAN IMMUNODEFICIENCY VIRUS
NYELAVGALI

SEQ ID NO: 5090 - protein, 10 aa, HUMAN IMMUNODEFICIENCY VIRUS
DYKLGVGALI

SEQ ID NO: 5091 - protein, 10 aa, HUMAN IMMUNODEFICIENCY VIRUS
DYRLGVGALI

SEQ ID NO: 5092 - protein, 10 aa, HUMAN IMMUNODEFICIENCY VIRUS
AIVVWTIVFI

SEQ ID NO: 5093 - protein, 10 aa, HUMAN IMMUNODEFICIENCY VIRUS
VVWTIVFIEY

SEQ ID NO: 5094 - protein, 10 aa, HUMAN IMMUNODEFICIENCY VIRUS
ILRQRKIDRL

SEQ ID NO: 5095 - protein, 10 aa, HUMAN IMMUNODEFICIENCY VIRUS
GVEMGHHAPW

SEQ ID NO: 5096 - protein, 10 aa, HUMAN IMMUNODEFICIENCY VIRUS
LVTLLSSSKL

SEQ ID NO: 5097 - protein, 11 aa, HUMAN IMMUNODEFICIENCY VIRUS
KVDYRIVIVAF

SEQ ID NO: 5098 - protein, 11 aa, HUMAN IMMUNODEFICIENCY VIRUS
KVDYRLGVGAL

SEQ ID NO: 5099 - protein, 11 aa, HUMAN IMMUNODEFICIENCY VIRUS
RIDYRLGVGAL

SEQ ID NO: 5100 - protein, 11 aa, HUMAN IMMUNODEFICIENCY VIRUS
IVVWTIVFIEY

SEQ ID NO: 5101 - protein, 11 aa, HUMAN IMMUNODEFICIENCY VIRUS
EYRKILRQRKI

SEQ ID NO: 5102 - protein, 11 aa, HUMAN IMMUNODEFICIENCY VIRUS
KILRQRKIDRL

SEQ ID NO: 5103 - protein, 11 aa, HUMAN IMMUNODEFICIENCY VIRUS
ILRQRKIDRLI

SEQ ID NO: 5104 - protein, 11 aa, HUMAN IMMUNODEFICIENCY VIRUS
RIKEIRDDSDY

SEQ ID NO: 5105 - protein, 11 aa, HUMAN IMMUNODEFICIENCY VIRUS
RIREIRDDSDY

SEQ ID NO: 5106 - protein, 8 aa, HUMAN IMMUNODEFICIENCY VIRUS
DPNPQEVV

SEQ ID NO: 5107 - protein, 8 aa, HUMAN IMMUNODEFICIENCY VIRUS
APAGFAIL

SEQ ID NO: 5108 - protein, 8 aa, HUMAN IMMUNODEFICIENCY VIRUS
KPVVSTQL

SEQ ID NO: 5109 - protein, 8 aa, HUMAN IMMUNODEFICIENCY VIRUS
RPVVSTQL

SEQ ID NO: 5110 - protein, 8 aa, HUMAN IMMUNODEFICIENCY VIRUS
GPGQTFYA

SEQ ID NO: 5111 - protein, 8 aa, HUMAN IMMUNODEFICIENCY VIRUS
LPCRIKQI

SEQ ID NO: 5112 - protein, 8 aa, HUMAN IMMUNODEFICIENCY VIRUS
SPLSFQTL

SEQ ID NO: 5113 - protein, 8 aa, HUMAN IMMUNODEFICIENCY VIRUS
GPDRPEGI

SEQ ID NO: 5114 - protein, 8 aa, HUMAN IMMUNODEFICIENCY VIRUS
EPDRPERI

SEQ ID NO: 5115 - protein, 8 aa, HUMAN IMMUNODEFICIENCY VIRUS
PPDRPEGI

SEQ ID NO: 5116 - protein, 9 aa, HUMAN IMMUNODEFICIENCY VIRUS
DPNPQEVVL

SEQ ID NO: 5117 - protein, 9 aa, HUMAN IMMUNODEFICIENCY VIRUS
KPCVKLTPL

SEQ ID NO: 5118 - protein, 9 aa, HUMAN IMMUNODEFICIENCY VIRUS
CPKVSFEPI

SEQ ID NO: 5119 - protein, 9 aa, HUMAN IMMUNODEFICIENCY VIRUS
DPIPIHYCA

SEQ ID NO: 5120 - protein, 9 aa, HUMAN IMMUNODEFICIENCY VIRUS
EPIPIHYCA

SEQ ID NO: 5121 - protein, 9 aa, HUMAN IMMUNODEFICIENCY VIRUS
IPIHYCAPA

SEQ ID NO: 5122 - protein, 9 aa, HUMAN IMMUNODEFICIENCY VIRUS
IPIHYCTPA

SEQ ID NO: 5123 - protein, 9 aa, HUMAN IMMUNODEFICIENCY VIRUS
GPCKNVSTV

SEQ ID NO: 5124 - protein, 9 aa, HUMAN IMMUNODEFICIENCY VIRUS
GPCTNVSTV

SEQ ID NO: 5125 - protein, 9 aa, HUMAN IMMUNODEFICIENCY VIRUS
KPVVSTQLL

SEQ ID NO: 5126 - protein, 9 aa, HUMAN IMMUNODEFICIENCY VIRUS
RPVVSTQLL

SEQ ID NO: 5127 - protein, 9 aa, HUMAN IMMUNODEFICIENCY VIRUS
DPEIVMHSF

SEQ ID NO: 5128 - protein, 9 aa, HUMAN IMMUNODEFICIENCY VIRUS
LPCRIKQII

SEQ ID NO: 5129 - protein, 9 aa, HUMAN IMMUNODEFICIENCY VIRUS
LPCRIKQIV

SEQ ID NO: 5130 - protein, 9 aa, HUMAN IMMUNODEFICIENCY VIRUS
APTKAKRRV

SEQ ID NO: 5131 - protein, 9 aa, HUMAN IMMUNODEFICIENCY VIRUS
SPLSFQTLL

SEQ ID NO: 5132 - protein, 9 aa, HUMAN IMMUNODEFICIENCY VIRUS
IPRRIRQGF

SEQ ID NO: 5133 - protein, 9 aa, HUMAN IMMUNODEFICIENCY VIRUS
IPRRIRQGL

SEQ ID NO: 5134 - protein, 9 aa, HUMAN IMMUNODEFICIENCY VIRUS
IPTRIRQGL

SEQ ID NO: 5135 - protein, 10 aa, HUMAN IMMUNODEFICIENCY VIRUS
VPTDPNPQEI

SEQ ID NO: 5136 - protein, 10 aa, HUMAN IMMUNODEFICIENCY VIRUS
VPTDPNPQEV

SEQ ID NO: 5137 - protein, 10 aa, HUMAN IMMUNODEFICIENCY VIRUS
KPVVSTQLLL

SEQ ID NO: 5138 - protein, 10 aa, HUMAN IMMUNODEFICIENCY VIRUS
RPVVSTQLLL

SEQ ID NO: 5139 - protein, 10 aa, HUMAN IMMUNODEFICIENCY VIRUS
RPNNNTRKSI

SEQ ID NO: 5140 - protein, 10 aa, HUMAN IMMUNODEFICIENCY VIRUS
EPLGVAPTKA

SEQ ID NO: 5141 - protein, 10 aa, HUMAN IMMUNODEFICIENCY VIRUS
APTKAKRRVV

SEQ ID NO: 5142 - protein, 11 aa, HUMAN IMMUNODEFICIENCY VIRUS
VPVWKEATTTL

SEQ ID NO: 5143 - protein, 11 aa, HUMAN IMMUNODEFICIENCY VIRUS
VPTDPNPQEVV

SEQ ID NO: 5144 - protein, 11 aa, HUMAN IMMUNODEFICIENCY VIRUS
KPCVKLTPLCV

SEQ ID NO: 5145 - protein, 11 aa, HUMAN IMMUNODEFICIENCY VIRUS
CPKVSFEPIPI

SEQ ID NO: 5146 - protein, 11 aa, HUMAN IMMUNODEFICIENCY VIRUS
DPIPIHYCAPA

SEQ ID NO: 5147 - protein, 11 aa, HUMAN IMMUNODEFICIENCY VIRUS
EPIPIHYCAPA

SEQ ID NO: 5148 - protein, 11 aa, HUMAN IMMUNODEFICIENCY VIRUS
EPIPIHYCTPA

SEQ ID NO: 5149 - protein, 11 aa, HUMAN IMMUNODEFICIENCY VIRUS
IPIHYCAPAGF

SEQ ID NO: 5150 - protein, 11 aa, HUMAN IMMUNODEFICIENCY VIRUS
IPIHYCTPAGF

SEQ ID NO: 5151 - protein, 11 aa, HUMAN IMMUNODEFICIENCY VIRUS
LPCRIKQIINM

SEQ ID NO: 5152 - protein, 11 aa, HUMAN IMMUNODEFICIENCY VIRUS
RPGGGDMRDNW

SEQ ID NO: 5153 - protein, 8 aa, HUMAN IMMUNODEFICIENCY VIRUS
RPGGKKKY

SEQ ID NO: 5154 - protein, 8 aa, HUMAN IMMUNODEFICIENCY VIRUS
NPGLLETA

SEQ ID NO: 5155 - protein, 8 aa, HUMAN IMMUNODEFICIENCY VIRUS
SPRTLNAW

SEQ ID NO: 5156 - protein, 8 aa, HUMAN IMMUNODEFICIENCY VIRUS
SPEVIPMF

SEQ ID NO: 5157 - protein, 8 aa, HUMAN IMMUNODEFICIENCY VIRUS
TPQDLNMM

SEQ ID NO: 5158 - protein, 8 aa, HUMAN IMMUNODEFICIENCY VIRUS
TPQDLNTM

SEQ ID NO: 5159 - protein, 8 aa, HUMAN IMMUNODEFICIENCY VIRUS
HPVHAGPI

SEQ ID NO: 5160 - protein, 8 aa, HUMAN IMMUNODEFICIENCY VIRUS
GPIAPGQM

SEQ ID NO: 5161 - protein, 8 aa, HUMAN IMMUNODEFICIENCY VIRUS
GPIPPGQM

SEQ ID NO: 5162 - protein, 8 aa, HUMAN IMMUNODEFICIENCY VIRUS
GPVAPGQM

SEQ ID NO: 5163 - protein, 8 aa, HUMAN IMMUNODEFICIENCY VIRUS
EPRGSDIA

SEQ ID NO: 5164 - protein, 8 aa, HUMAN IMMUNODEFICIENCY VIRUS
PPIPVGDI

SEQ ID NO: 5165 - protein, 8 aa, HUMAN IMMUNODEFICIENCY VIRUS
PPIPVGEI

SEQ ID NO: 5166 - protein, 8 aa, HUMAN IMMUNODEFICIENCY VIRUS
SPTSILDI

SEQ ID NO: 5167 - protein, 8 aa, HUMAN IMMUNODEFICIENCY VIRUS
SPVSILDI

SEQ ID NO: 5168 - protein, 8 aa, HUMAN IMMUNODEFICIENCY VIRUS
NPDCKSIL

SEQ ID NO: 5169 - protein, 8 aa, HUMAN IMMUNODEFICIENCY VIRUS
NPDCKTIL

SEQ ID NO: 5170 - protein, 8 aa, HUMAN IMMUNODEFICIENCY VIRUS
GPGHKARV

SEQ ID NO: 5171 - protein, 8 aa, HUMAN IMMUNODEFICIENCY VIRUS
GPSHKARV

SEQ ID NO: 5172 - protein, 8 aa, HUMAN IMMUNODEFICIENCY VIRUS
APRKKGCW

SEQ ID NO: 5173 - protein, 8 aa, HUMAN IMMUNODEFICIENCY VIRUS
PPAESFGF

SEQ ID NO: 5174 - protein, 8 aa, HUMAN IMMUNODEFICIENCY VIRUS
PPEESFRF

SEQ ID NO: 5175 - protein, 8 aa, HUMAN IMMUNODEFICIENCY VIRUS
PPAESFRF

SEQ ID NO: 5176 - protein, 8 aa, HUMAN IMMUNODEFICIENCY VIRUS
PPPESFRF

SEQ ID NO: 5177 - protein, 8 aa, HUMAN IMMUNODEFICIENCY VIRUS
EPIDKELY

SEQ ID NO: 5178 - protein, 8 aa, HUMAN IMMUNODEFICIENCY VIRUS
EPIDKELY

SEQ ID NO: 5179 - protein, 9 aa, HUMAN IMMUNODEFICIENCY VIRUS
SPRTLNAWV

SEQ ID NO: 5180 - protein, 9 aa, HUMAN IMMUNODEFICIENCY VIRUS
TPQDLNMML

SEQ ID NO: 5181 - protein, 9 aa, HUMAN IMMUNODEFICIENCY VIRUS
TPQDLNTML

SEQ ID NO: 5182 - protein, 9 aa, HUMAN IMMUNODEFICIENCY VIRUS
HPVHAGPIA

SEQ ID NO: 5183 - protein, 9 aa, HUMAN IMMUNODEFICIENCY VIRUS
NPPIPVGDI

SEQ ID NO: 5184 - protein, 9 aa, HUMAN IMMUNODEFICIENCY VIRUS
NPPIPVGEI

SEQ ID NO: 5185 - protein, 9 aa, HUMAN IMMUNODEFICIENCY VIRUS
PPIPVGDIY

SEQ ID NO: 5186 - protein, 9 aa, HUMAN IMMUNODEFICIENCY VIRUS
PPIPVGEIY

SEQ ID NO: 5187 - protein, 9 aa, HUMAN IMMUNODEFICIENCY VIRUS
GPKEPFRDY

SEQ ID NO: 5188 - protein, 9 aa, HUMAN IMMUNODEFICIENCY VIRUS
GPAATLEEM

SEQ ID NO: 5189 - protein, 9 aa, HUMAN IMMUNODEFICIENCY VIRUS
GPGATLEEM

SEQ ID NO: 5190 - protein, 9 aa, HUMAN IMMUNODEFICIENCY VIRUS
GPGHKARVL

SEQ ID NO: 5191 - protein, 9 aa, HUMAN IMMUNODEFICIENCY VIRUS
GPSHKARVL

SEQ ID NO: 5192 - protein, 9 aa, HUMAN IMMUNODEFICIENCY VIRUS
RPEPTAPPA

SEQ ID NO: 5193 - protein, 9 aa, HUMAN IMMUNODEFICIENCY VIRUS
APPAESFGF

SEQ ID NO: 5194 - protein, 9 aa, HUMAN IMMUNODEFICIENCY VIRUS
APPEESFRF

SEQ ID NO: 5195 - protein, 9 aa, HUMAN IMMUNODEFICIENCY VIRUS
RPEPTAPPA

SEQ ID NO: 5196 - protein, 9 aa, HUMAN IMMUNODEFICIENCY VIRUS
APPAESFRF

SEQ ID NO: 5197 - protein, 9 aa, HUMAN IMMUNODEFICIENCY VIRUS
APPPESFRF

SEQ ID NO: 5198 - protein, 9 aa, HUMAN IMMUNODEFICIENCY VIRUS
TPSQKQEPI

SEQ ID NO: 5199 - protein, 9 aa, HUMAN IMMUNODEFICIENCY VIRUS
YPLASLKSL

SEQ ID NO: 5200 - protein, 9 aa, HUMAN IMMUNODEFICIENCY VIRUS
YPLASLRSL

SEQ ID NO: 5201 - protein, 9 aa, HUMAN IMMUNODEFICIENCY VIRUS
PPLASLKSL

SEQ ID NO: 5202 - protein, 9 aa, HUMAN IMMUNODEFICIENCY VIRUS
EPLTALRSL

SEQ ID NO: 5203 - protein, 9 aa, HUMAN IMMUNODEFICIENCY VIRUS
PPLASLKSL

SEQ ID NO: 5204 - protein, 9 aa, HUMAN IMMUNODEFICIENCY VIRUS
PPLISLKSL

SEQ ID NO: 5205 - protein, 10 aa, HUMAN IMMUNODEFICIENCY VIRUS
RPGGKKKYKL

SEQ ID NO: 5206 - protein, 10 aa, HUMAN IMMUNODEFICIENCY VIRUS
RPGGKKKYRL

SEQ ID NO: 5207 - protein, 10 aa, HUMAN IMMUNODEFICIENCY VIRUS
SPEVIPMFSA

SEQ ID NO: 5208 - protein, 10 aa, HUMAN IMMUNODEFICIENCY VIRUS
SPEVIPMFTA

SEQ ID NO: 5209 - protein, 10 aa, HUMAN IMMUNODEFICIENCY VIRUS
NPPIPVGDIY

SEQ ID NO: 5210 - protein, 10 aa, HUMAN IMMUNODEFICIENCY VIRUS
NPPIPVGEIY

SEQ ID NO: 5211 - protein, 10 aa, HUMAN IMMUNODEFICIENCY VIRUS
IPVGDIYKRW

SEQ ID NO: 5212 - protein, 10 aa, HUMAN IMMUNODEFICIENCY VIRUS
IPVGEIYKRW

SEQ ID NO: 5213 - protein, 10 aa, HUMAN IMMUNODEFICIENCY VIRUS
GPKEPFRDYV

SEQ ID NO: 5214 - protein, 10 aa, HUMAN IMMUNODEFICIENCY VIRUS
EPFRDYVDRF

SEQ ID NO: 5215 - protein, 10 aa, HUMAN IMMUNODEFICIENCY VIRUS
NPDCKTILKA

SEQ ID NO: 5216 - protein, 10 aa, HUMAN IMMUNODEFICIENCY VIRUS
NPDCKTILRA

SEQ ID NO: 5217 - protein, 10 aa, HUMAN IMMUNODEFICIENCY VIRUS
GPAATLEEMM

SEQ ID NO: 5218 - protein, 10 aa, HUMAN IMMUNODEFICIENCY VIRUS
GPGATLEEMM

SEQ ID NO: 5219 - protein, 10 aa, HUMAN IMMUNODEFICIENCY VIRUS
GPGHKARVLA

SEQ ID NO: 5220 - protein, 10 aa, HUMAN IMMUNODEFICIENCY VIRUS
GPSHKARVLA

SEQ ID NO: 5221 - protein, 10 aa, HUMAN IMMUNODEFICIENCY VIRUS
PPAEPTAPPA

SEQ ID NO: 5222 - protein, 10 aa, HUMAN IMMUNODEFICIENCY VIRUS
EPTAPPAESF

SEQ ID NO: 5223 - protein, 10 aa, HUMAN IMMUNODEFICIENCY VIRUS
EPTAPPEESF

SEQ ID NO: 5224 - protein, 10 aa, HUMAN IMMUNODEFICIENCY VIRUS
EPTAPPAESF

SEQ ID NO: 5225 - protein, 10 aa, HUMAN IMMUNODEFICIENCY VIRUS
EPTAPPPESF

SEQ ID NO: 5226 - protein, 10 aa, HUMAN IMMUNODEFICIENCY VIRUS
PPESFRFEEA

SEQ ID NO: 5227 - protein, 10 aa, HUMAN IMMUNODEFICIENCY VIRUS
EPIDKELYPL

SEQ ID NO: 5228 - protein, 10 aa, HUMAN IMMUNODEFICIENCY VIRUS
EPIDKELYPL

SEQ ID NO: 5229 - protein, 10 aa, HUMAN IMMUNODEFICIENCY VIRUS
YPLASLKSLF

SEQ ID NO: 5230 - protein, 10 aa, HUMAN IMMUNODEFICIENCY VIRUS
YPLASLRSLF

SEQ ID NO: 5231 - protein, 10 aa, HUMAN IMMUNODEFICIENCY VIRUS
PPLASLKSLF

SEQ ID NO: 5232 - protein, 10 aa, HUMAN IMMUNODEFICIENCY VIRUS
EPLTALRSLF

SEQ ID NO: 5233 - protein, 10 aa, HUMAN IMMUNODEFICIENCY VIRUS
PPLASLKSLF

SEQ ID NO: 5234 - protein, 10 aa, HUMAN IMMUNODEFICIENCY VIRUS
PPLISLKSLF

SEQ ID NO: 5235 - protein, 11 aa, HUMAN IMMUNODEFICIENCY VIRUS
QPSLQTGSEEL

SEQ ID NO: 5236 - protein, 11 aa, HUMAN IMMUNODEFICIENCY VIRUS
YPIVQNAQGQM

SEQ ID NO: 5237 - protein, 11 aa, HUMAN IMMUNODEFICIENCY VIRUS
YPIVQNLQGQM

SEQ ID NO: 5238 - protein, 11 aa, HUMAN IMMUNODEFICIENCY VIRUS
SPRTLNAWVKV

SEQ ID NO: 5239 - protein, 11 aa, HUMAN IMMUNODEFICIENCY VIRUS
SPEVIPMFSAL

SEQ ID NO: 5240 - protein, 11 aa, HUMAN IMMUNODEFICIENCY VIRUS
SPEVIPMFTAL

SEQ ID NO: 5241 - protein, 11 aa, HUMAN IMMUNODEFICIENCY VIRUS
IPMFSALSEGA

SEQ ID NO: 5242 - protein, 11 aa, HUMAN IMMUNODEFICIENCY VIRUS
IPMFTALSEGA

SEQ ID NO: 5243 - protein, 11 aa, HUMAN IMMUNODEFICIENCY VIRUS
TPQDLNMMLNI

SEQ ID NO: 5244 - protein, 11 aa, HUMAN IMMUNODEFICIENCY VIRUS
IPVGDIYKRWI

SEQ ID NO: 5245 - protein, 11 aa, HUMAN IMMUNODEFICIENCY VIRUS
IPVGEIYKRWI

SEQ ID NO: 5246 - protein, 11 aa, HUMAN IMMUNODEFICIENCY VIRUS
EPFRDYVDRFF

SEQ ID NO: 5247 - protein, 11 aa, HUMAN IMMUNODEFICIENCY VIRUS
EPFRDYVDRFY

SEQ ID NO: 5248 - protein, 11 aa, HUMAN IMMUNODEFICIENCY VIRUS
NPDCKTILKAL

SEQ ID NO: 5249 - protein, 11 aa, HUMAN IMMUNODEFICIENCY VIRUS
NPDCKTILRAL

SEQ ID NO: 5250 - protein, 11 aa, HUMAN IMMUNODEFICIENCY VIRUS
WPSHKGRPGNF

SEQ ID NO: 5251 - protein, 11 aa, HUMAN IMMUNODEFICIENCY VIRUS
WPSNKGRPGNF

SEQ ID NO: 5252 - protein, 11 aa, HUMAN IMMUNODEFICIENCY VIRUS
WPSSKGRPGNF

SEQ ID NO: 5253 - protein, 11 aa, HUMAN IMMUNODEFICIENCY VIRUS
PPPESFRFEEA

SEQ ID NO: 5254 - protein, 8 aa, HUMAN IMMUNODEFICIENCY VIRUS
APTAAKGV

SEQ ID NO: 5255 - protein, 8 aa, HUMAN IMMUNODEFICIENCY VIRUS
VPLRPMTF

SEQ ID NO: 5256 - protein, 8 aa, HUMAN IMMUNODEFICIENCY VIRUS
VPLRPMTY

SEQ ID NO: 5257 - protein, 8 aa, HUMAN IMMUNODEFICIENCY VIRUS
RPMTYKAA

SEQ ID NO: 5258 - protein, 8 aa, HUMAN IMMUNODEFICIENCY VIRUS
RPMTYKGA

SEQ ID NO: 5259 - protein, 8 aa, HUMAN IMMUNODEFICIENCY VIRUS
TPGPGIRY

SEQ ID NO: 5260 - protein, 8 aa, HUMAN IMMUNODEFICIENCY VIRUS
TPGPGTRF

SEQ ID NO: 5261 - protein, 8 aa, HUMAN IMMUNODEFICIENCY VIRUS
GPGIRYPL

SEQ ID NO: 5262 - protein, 8 aa, HUMAN IMMUNODEFICIENCY VIRUS
GPGTRFPL

SEQ ID NO: 5263 - protein, 8 aa, HUMAN IMMUNODEFICIENCY VIRUS
VPVDPREV

SEQ ID NO: 5264 - protein, 8 aa, HUMAN IMMUNODEFICIENCY VIRUS
HPICQHGM

SEQ ID NO: 5265 - protein, 8 aa, HUMAN IMMUNODEFICIENCY VIRUS
HPMSQHGM

SEQ ID NO: 5266 - protein, 9 aa, HUMAN IMMUNODEFICIENCY VIRUS
EPAADGVGA

SEQ ID NO: 5267 - protein, 9 aa, HUMAN IMMUNODEFICIENCY VIRUS
PPAAEGVGA

SEQ ID NO: 5268 - protein, 9 aa, HUMAN IMMUNODEFICIENCY VIRUS
FPVRPQVPL

SEQ ID NO: 5269 - protein, 9 aa, HUMAN IMMUNODEFICIENCY VIRUS
RPQVPLRPM

SEQ ID NO: 5270 - protein, 9 aa, HUMAN IMMUNODEFICIENCY VIRUS
RPMTYKGAF

SEQ ID NO: 5271 - protein, 9 aa, HUMAN IMMUNODEFICIENCY VIRUS
FPLTFGWCF

SEQ ID NO: 5272 - protein, 9 aa, HUMAN IMMUNODEFICIENCY VIRUS
YPLTFGWCF

SEQ ID NO: 5273 - protein, 10 aa, HUMAN IMMUNODEFICIENCY VIRUS
APTAAKGVGA

SEQ ID NO: 5274 - protein, 10 aa, HUMAN IMMUNODEFICIENCY VIRUS
EPAADGVGAV

SEQ ID NO: 5275 - protein, 10 aa, HUMAN IMMUNODEFICIENCY VIRUS
VPLRPMTYKA

SEQ ID NO: 5276 - protein, 10 aa, HUMAN IMMUNODEFICIENCY VIRUS
TPGPGIRYPL

SEQ ID NO: 5277 - protein, 10 aa, HUMAN IMMUNODEFICIENCY VIRUS
TPGPGTRFPL

SEQ ID NO: 5278 - protein, 10 aa, HUMAN IMMUNODEFICIENCY VIRUS
GPGIRYPLTF

SEQ ID NO: 5279 - protein, 10 aa, HUMAN IMMUNODEFICIENCY VIRUS
GPGTRFPLTF

SEQ ID NO: 5280 - protein, 11 aa, HUMAN IMMUNODEFICIENCY VIRUS
APTAAKGVGAV

SEQ ID NO: 5281 - protein, 11 aa, HUMAN IMMUNODEFICIENCY VIRUS
RPQVPLRPMTF

SEQ ID NO: 5282 - protein, 11 aa, HUMAN IMMUNODEFICIENCY VIRUS
RPQVPLRPMTY

SEQ ID NO: 5283 - protein, 11 aa, HUMAN IMMUNODEFICIENCY VIRUS
VPLRPMTYKAA

SEQ ID NO: 5284 - protein, 11 aa, HUMAN IMMUNODEFICIENCY VIRUS
VPLRPMTYKGA

SEQ ID NO: 5285 - protein, 11 aa, HUMAN IMMUNODEFICIENCY VIRUS
RPMTYKGAFDL

SEQ ID NO: 5286 - protein, 11 aa, HUMAN IMMUNODEFICIENCY VIRUS
FPLTFGWCFKL

SEQ ID NO: 5287 - protein, 11 aa, HUMAN IMMUNODEFICIENCY VIRUS
YPLTFGWCFKL

SEQ ID NO: 5288 - protein, 8 aa, HUMAN IMMUNODEFICIENCY VIRUS
EPGEDREL

SEQ ID NO: 5289 - protein, 8 aa, HUMAN IMMUNODEFICIENCY VIRUS
GPERALSV

SEQ ID NO: 5290 - protein, 8 aa, HUMAN IMMUNODEFICIENCY VIRUS
RPLVTIKI

SEQ ID NO: 5291 - protein, 8 aa, HUMAN IMMUNODEFICIENCY VIRUS
RPLVTVKI

SEQ ID NO: 5292 - protein, 8 aa, HUMAN IMMUNODEFICIENCY VIRUS
KPKMIGGI

SEQ ID NO: 5293 - protein, 8 aa, HUMAN IMMUNODEFICIENCY VIRUS
GPTPVNII

SEQ ID NO: 5294 - protein, 8 aa, HUMAN IMMUNODEFICIENCY VIRUS
SPIETVPV

SEQ ID NO: 5295 - protein, 8 aa, HUMAN IMMUNODEFICIENCY VIRUS
WPLTEEKI

SEQ ID NO: 5296 - protein, 8 aa, HUMAN IMMUNODEFICIENCY VIRUS
NPYNTPIF

SEQ ID NO: 5297 - protein, 8 aa, HUMAN IMMUNODEFICIENCY VIRUS
NPYNTPVF

SEQ ID NO: 5298 - protein, 8 aa, HUMAN IMMUNODEFICIENCY VIRUS
TPGIRYQY

SEQ ID NO: 5299 - protein, 8 aa, HUMAN IMMUNODEFICIENCY VIRUS
PPFLWMGY

SEQ ID NO: 5300 - protein, 8 aa, HUMAN IMMUNODEFICIENCY VIRUS
EPVHGVYY

SEQ ID NO: 5301 - protein, 8 aa, HUMAN IMMUNODEFICIENCY VIRUS
DPSKDLIA

SEQ ID NO: 5302 - protein, 8 aa, HUMAN IMMUNODEFICIENCY VIRUS
TPKFKLPI

SEQ ID NO: 5303 - protein, 8 aa, HUMAN IMMUNODEFICIENCY VIRUS
TPKFRLPI

SEQ ID NO: 5304 - protein, 8 aa, HUMAN IMMUNODEFICIENCY VIRUS
LPIQKETW

SEQ ID NO: 5305 - protein, 8 aa, HUMAN IMMUNODEFICIENCY VIRUS
TPPLVKLW

SEQ ID NO: 5306 - protein, 8 aa, HUMAN IMMUNODEFICIENCY VIRUS
PPLVKLWY

SEQ ID NO: 5307 - protein, 8 aa, HUMAN IMMUNODEFICIENCY VIRUS
PPIVAKEI

SEQ ID NO: 5308 - protein, 8 aa, HUMAN IMMUNODEFICIENCY VIRUS
PPVVAKEI

SEQ ID NO: 5309 - protein, 8 aa, HUMAN IMMUNODEFICIENCY VIRUS
NPQSQGVV

SEQ ID NO: 5310 - protein, 8 aa, HUMAN IMMUNODEFICIENCY VIRUS
DPIWKGPA

SEQ ID NO: 5311 - protein, 8 aa, HUMAN IMMUNODEFICIENCY VIRUS
DPLWKGPA

SEQ ID NO: 5312 - protein, 8 aa, HUMAN IMMUNODEFICIENCY VIRUS
VPRRKAKI

SEQ ID NO: 5313 - protein, 8 aa, HUMAN IMMUNODEFICIENCY VIRUS
VPRRKVKI

SEQ ID NO: 5314 - protein, 9 aa, HUMAN IMMUNODEFICIENCY VIRUS
FPQGEAREF

SEQ ID NO: 5315 - protein, 9 aa, HUMAN IMMUNODEFICIENCY VIRUS
SPTRRELQV

SEQ ID NO: 5316 - protein, 9 aa, HUMAN IMMUNODEFICIENCY VIRUS
SPTSRELQV

SEQ ID NO: 5317 - protein, 9 aa, HUMAN IMMUNODEFICIENCY VIRUS
SPSSRELQV

SEQ ID NO: 5318 - protein, 9 aa, HUMAN IMMUNODEFICIENCY VIRUS
VPTFNFPQI

SEQ ID NO: 5319 - protein, 9 aa, HUMAN IMMUNODEFICIENCY VIRUS
LPGKWKPKM

SEQ ID NO: 5320 - protein, 9 aa, HUMAN IMMUNODEFICIENCY VIRUS
LPGRWKPKM

SEQ ID NO: 5321 - protein, 9 aa, HUMAN IMMUNODEFICIENCY VIRUS
FPISPIETV

SEQ ID NO: 5322 - protein, 9 aa, HUMAN IMMUNODEFICIENCY VIRUS
VPVKLKPGM

SEQ ID NO: 5323 - protein, 9 aa, HUMAN IMMUNODEFICIENCY VIRUS
KPGMDGPKV

SEQ ID NO: 5324 - protein, 9 aa, HUMAN IMMUNODEFICIENCY VIRUS
GPKVKQWPL

SEQ ID NO: 5325 - protein, 9 aa, HUMAN IMMUNODEFICIENCY VIRUS
NPYNTPIFA

SEQ ID NO: 5326 - protein, 9 aa, HUMAN IMMUNODEFICIENCY VIRUS
NPYNTPVFA

SEQ ID NO: 5327 - protein, 9 aa, HUMAN IMMUNODEFICIENCY VIRUS
SPAIFQSSM

SEQ ID NO: 5328 - protein, 9 aa, HUMAN IMMUNODEFICIENCY VIRUS
NPDIVIYQY

SEQ ID NO: 5329 - protein, 9 aa, HUMAN IMMUNODEFICIENCY VIRUS
NPEIVIYQY

SEQ ID NO: 5330 - protein, 9 aa, HUMAN IMMUNODEFICIENCY VIRUS
EPPFLWMGY

SEQ ID NO: 5331 - protein, 9 aa, HUMAN IMMUNODEFICIENCY VIRUS
LPEKDSWTV

SEQ ID NO: 5332 - protein, 9 aa, HUMAN IMMUNODEFICIENCY VIRUS
YPGIKVKQL

SEQ ID NO: 5333 - protein, 9 aa, HUMAN IMMUNODEFICIENCY VIRUS
YPGIKVRQL

SEQ ID NO: 5334 - protein, 9 aa, HUMAN IMMUNODEFICIENCY VIRUS
IPLTEEAEL

SEQ ID NO: 5335 - protein, 9 aa, HUMAN IMMUNODEFICIENCY VIRUS
VPLTEEAEL

SEQ ID NO: 5336 - protein, 9 aa, HUMAN IMMUNODEFICIENCY VIRUS
TPPLVKLWY

SEQ ID NO: 5337 - protein, 9 aa, HUMAN IMMUNODEFICIENCY VIRUS
EPIVGAETF

SEQ ID NO: 5338 - protein, 9 aa, HUMAN IMMUNODEFICIENCY VIRUS
QPDKSESEL

SEQ ID NO: 5339 - protein, 9 aa, HUMAN IMMUNODEFICIENCY VIRUS
LPPIVAKEI

SEQ ID NO: 5340 - protein, 9 aa, HUMAN IMMUNODEFICIENCY VIRUS
LPPVVAKEI

SEQ ID NO: 5341 - protein, 9 aa, HUMAN IMMUNODEFICIENCY VIRUS
PPIVAKEIV

SEQ ID NO: 5342 - protein, 9 aa, HUMAN IMMUNODEFICIENCY VIRUS
PPVVAKEIV

SEQ ID NO: 5343 - protein, 9 aa, HUMAN IMMUNODEFICIENCY VIRUS
VPRRKAKII

SEQ ID NO: 5344 - protein, 9 aa, HUMAN IMMUNODEFICIENCY VIRUS
VPRRKVKII

SEQ ID NO: 5345 - protein, 10 aa, HUMAN IMMUNODEFICIENCY VIRUS
SPTRRELQVW

SEQ ID NO: 5346 - protein, 10 aa, HUMAN IMMUNODEFICIENCY VIRUS
EPGEDRELSV

SEQ ID NO: 5347 - protein, 10 aa, HUMAN IMMUNODEFICIENCY VIRUS
GPERALSVCL

SEQ ID NO: 5348 - protein, 10 aa, HUMAN IMMUNODEFICIENCY VIRUS
LPGKWKPKMI

SEQ ID NO: 5349 - protein, 10 aa, HUMAN IMMUNODEFICIENCY VIRUS
LPGRWKPKMI

SEQ ID NO: 5350 - protein, 10 aa, HUMAN IMMUNODEFICIENCY VIRUS
TPVNIIGRNL

SEQ ID NO: 5351 - protein, 10 aa, HUMAN IMMUNODEFICIENCY VIRUS
TPVNIIGRNM

SEQ ID NO: 5352 - protein, 10 aa, HUMAN IMMUNODEFICIENCY VIRUS
SPIETVPVKL

SEQ ID NO: 5353 - protein, 10 aa, HUMAN IMMUNODEFICIENCY VIRUS
WPLTEEKIKA

SEQ ID NO: 5354 - protein, 10 aa, HUMAN IMMUNODEFICIENCY VIRUS
GPENPYNTPI

SEQ ID NO: 5355 - protein, 10 aa, HUMAN IMMUNODEFICIENCY VIRUS
GPENPYNTPV

SEQ ID NO: 5356 - protein, 10 aa, HUMAN IMMUNODEFICIENCY VIRUS
NPYNTPIFAI

SEQ ID NO: 5357 - protein, 10 aa, HUMAN IMMUNODEFICIENCY VIRUS
NPYNTPVFAI

SEQ ID NO: 5358 - protein, 10 aa, HUMAN IMMUNODEFICIENCY VIRUS
VPLDKDFRKY

SEQ ID NO: 5359 - protein, 10 aa, HUMAN IMMUNODEFICIENCY VIRUS
TPGIRYQYNV

SEQ ID NO: 5360 - protein, 10 aa, HUMAN IMMUNODEFICIENCY VIRUS
LPQGWKGSPA

SEQ ID NO: 5361 - protein, 10 aa, HUMAN IMMUNODEFICIENCY VIRUS
EPFRKQNPDI

SEQ ID NO: 5362 - protein, 10 aa, HUMAN IMMUNODEFICIENCY VIRUS
NPDIVIYQYM

SEQ ID NO: 5363 - protein, 10 aa, HUMAN IMMUNODEFICIENCY VIRUS
NPEIVIYQYM

SEQ ID NO: 5364 - protein, 10 aa, HUMAN IMMUNODEFICIENCY VIRUS
PPFLWMGYEL

SEQ ID NO: 5365 - protein, 10 aa, HUMAN IMMUNODEFICIENCY VIRUS
HPDKWTVQPI

SEQ ID NO: 5366 - protein, 10 aa, HUMAN IMMUNODEFICIENCY VIRUS
DPSKDLIAEI

SEQ ID NO: 5367 - protein, 10 aa, HUMAN IMMUNODEFICIENCY VIRUS
LPIQKETWEA

SEQ ID NO: 5368 - protein, 10 aa, HUMAN IMMUNODEFICIENCY VIRUS
PPLVKLWYQL

SEQ ID NO: 5369 - protein, 10 aa, HUMAN IMMUNODEFICIENCY VIRUS
EPIVGAETFY

SEQ ID NO: 5370 - protein, 10 aa, HUMAN IMMUNODEFICIENCY VIRUS
QPDKSESELV

SEQ ID NO: 5371 - protein, 10 aa, HUMAN IMMUNODEFICIENCY VIRUS
LPPIVAKEIV

SEQ ID NO: 5372 - protein, 10 aa, HUMAN IMMUNODEFICIENCY VIRUS
LPPVVAKEIV

SEQ ID NO: 5373 - protein, 10 aa, HUMAN IMMUNODEFICIENCY VIRUS
PPIVAKEIVA

SEQ ID NO: 5374 - protein, 10 aa, HUMAN IMMUNODEFICIENCY VIRUS
PPVVAKEIVA

SEQ ID NO: 5375 - protein, 10 aa, HUMAN IMMUNODEFICIENCY VIRUS
IPAETGQETA

SEQ ID NO: 5376 - protein, 10 aa, HUMAN IMMUNODEFICIENCY VIRUS
IPYNPQSQGV

SEQ ID NO: 5377 - protein, 10 aa, HUMAN IMMUNODEFICIENCY VIRUS
DPIWKGPAKL

SEQ ID NO: 5378 - protein, 10 aa, HUMAN IMMUNODEFICIENCY VIRUS
DPLWKGPAKL

SEQ ID NO: 5379 - protein, 11 aa, HUMAN IMMUNODEFICIENCY VIRUS
VPTFNFPQITL

SEQ ID NO: 5380 - protein, 11 aa, HUMAN IMMUNODEFICIENCY VIRUS
FPQITLWQRPL

SEQ ID NO: 5381 - protein, 11 aa, HUMAN IMMUNODEFICIENCY VIRUS
KPKMIGGIGGF

SEQ ID NO: 5382 - protein, 11 aa, HUMAN IMMUNODEFICIENCY VIRUS
TPVNIIGRNLL

SEQ ID NO: 5383 - protein, 11 aa, HUMAN IMMUNODEFICIENCY VIRUS
TPVNIIGRNML

SEQ ID NO: 5384 - protein, 11 aa, HUMAN IMMUNODEFICIENCY VIRUS
FPISPIETVPV

SEQ ID NO: 5385 - protein, 11 aa, HUMAN IMMUNODEFICIENCY VIRUS
WPLTEEKIKAL

SEQ ID NO: 5386 - protein, 11 aa, HUMAN IMMUNODEFICIENCY VIRUS
GPENPYNTPIF

SEQ ID NO: 5387 - protein, 11 aa, HUMAN IMMUNODEFICIENCY VIRUS
GPENPYNTPVF

SEQ ID NO: 5388 - protein, 11 aa, HUMAN IMMUNODEFICIENCY VIRUS
HPAGLKKKKSV

SEQ ID NO: 5389 - protein, 11 aa, HUMAN IMMUNODEFICIENCY VIRUS
IPSINNETPGI

SEQ ID NO: 5390 - protein, 11 aa, HUMAN IMMUNODEFICIENCY VIRUS
IPSTNNETPGI

SEQ ID NO: 5391 - protein, 11 aa, HUMAN IMMUNODEFICIENCY VIRUS
TPGIRYQYNVL

SEQ ID NO: 5392 - protein, 11 aa, HUMAN IMMUNODEFICIENCY VIRUS
LPQGWKGSPAI

SEQ ID NO: 5393 - protein, 11 aa, HUMAN IMMUNODEFICIENCY VIRUS
EPFRKQNPDIV

SEQ ID NO: 5394 - protein, 11 aa, HUMAN IMMUNODEFICIENCY VIRUS
EPPFLWMGYEL

SEQ ID NO: 5395 - protein, 11 aa, HUMAN IMMUNODEFICIENCY VIRUS
HPDKWTVQPIV

SEQ ID NO: 5396 - protein, 11 aa, HUMAN IMMUNODEFICIENCY VIRUS
QPIQLPEKDSW

SEQ ID NO: 5397 - protein, 11 aa, HUMAN IMMUNODEFICIENCY VIRUS
QPIVLPEKDSW

SEQ ID NO: 5398 - protein, 11 aa, HUMAN IMMUNODEFICIENCY VIRUS
IPLTEEAELEL

SEQ ID NO: 5399 - protein, 11 aa, HUMAN IMMUNODEFICIENCY VIRUS
VPLTEEAELEL

SEQ ID NO: 5400 - protein, 11 aa, HUMAN IMMUNODEFICIENCY VIRUS
EPFKNLKTGKY

SEQ ID NO: 5401 - protein, 11 aa, HUMAN IMMUNODEFICIENCY VIRUS
LPIQKETWEAW

SEQ ID NO: 5402 - protein, 11 aa, HUMAN IMMUNODEFICIENCY VIRUS
LPIQKETWETW

SEQ ID NO: 5403 - protein, 11 aa, HUMAN IMMUNODEFICIENCY VIRUS
TPPLVKLWYQL

SEQ ID NO: 5404 - protein, 11 aa, HUMAN IMMUNODEFICIENCY VIRUS
EPIVGAETFYV

SEQ ID NO: 5405 - protein, 11 aa, HUMAN IMMUNODEFICIENCY VIRUS
LPPIVAKEIVA

SEQ ID NO: 5406 - protein, 11 aa, HUMAN IMMUNODEFICIENCY VIRUS
LPPVVAKEIVA

SEQ ID NO: 5407 - protein, 11 aa, HUMAN IMMUNODEFICIENCY VIRUS
IPAETGQETAY

SEQ ID NO: 5408 - protein, 11 aa, HUMAN IMMUNODEFICIENCY VIRUS
IPYNPQSQGVV

SEQ ID NO: 5409 - protein, 11 aa, HUMAN IMMUNODEFICIENCY VIRUS
NPQSQGVVESM

SEQ ID NO: 5410 - protein, 11 aa, HUMAN IMMUNODEFICIENCY VIRUS
DPIWKGPAKLL

SEQ ID NO: 5411 - protein, 11 aa, HUMAN IMMUNODEFICIENCY VIRUS
DPLWKGPAKLL

SEQ ID NO: 5412 - protein, 8 aa, HUMAN IMMUNODEFICIENCY VIRUS
SPEGTRQA

SEQ ID NO: 5413 - protein, 8 aa, HUMAN IMMUNODEFICIENCY VIRUS
RPAEPVPL

SEQ ID NO: 5414 - protein, 8 aa, HUMAN IMMUNODEFICIENCY VIRUS
VPLQLPPI

SEQ ID NO: 5415 - protein, 8 aa, HUMAN IMMUNODEFICIENCY VIRUS
VPLQLPPL

SEQ ID NO: 5416 - protein, 8 aa, HUMAN IMMUNODEFICIENCY VIRUS
PPLERLTL

SEQ ID NO: 5417 - protein, 9 aa, HUMAN IMMUNODEFICIENCY VIRUS
LPPLERLTL

SEQ ID NO: 5418 - protein, 9 aa, HUMAN IMMUNODEFICIENCY VIRUS
QPQGTETGV

SEQ ID NO: 5419 - protein, 10 aa, HUMAN IMMUNODEFICIENCY VIRUS
PPSPEGTRQA

SEQ ID NO: 5420 - protein, 10 aa, HUMAN IMMUNODEFICIENCY VIRUS
RPAEPVPLQL

SEQ ID NO: 5421 - protein, 10 aa, HUMAN IMMUNODEFICIENCY VIRUS
EPVPLQLPPI

SEQ ID NO: 5422 - protein, 10 aa, HUMAN IMMUNODEFICIENCY VIRUS
EPVPLQLPPL

SEQ ID NO: 5423 - protein, 11 aa, HUMAN IMMUNODEFICIENCY VIRUS
PPPSPEGTRQA

SEQ ID NO: 5424 - protein, 11 aa, HUMAN IMMUNODEFICIENCY VIRUS
VPLQLPPIERL

SEQ ID NO: 5425 - protein, 11 aa, HUMAN IMMUNODEFICIENCY VIRUS
VPLQLPPLERL

SEQ ID NO: 5426 - protein, 9 aa, HUMAN IMMUNODEFICIENCY VIRUS
HPGSQPKTA

SEQ ID NO: 5427 - protein, 9 aa, HUMAN IMMUNODEFICIENCY VIRUS
HPGSQPRTA

SEQ ID NO: 5428 - protein, 9 aa, HUMAN IMMUNODEFICIENCY VIRUS
GPKESKKKV

SEQ ID NO: 5429 - protein, 10 aa, HUMAN IMMUNODEFICIENCY VIRUS
EPVDPNLEPW

SEQ ID NO: 5430 - protein, 10 aa, HUMAN IMMUNODEFICIENCY VIRUS
EPVDPRLEPW

SEQ ID NO: 5431 - protein, 8 aa, HUMAN IMMUNODEFICIENCY VIRUS
HPKISSEV

SEQ ID NO: 5432 - protein, 8 aa, HUMAN IMMUNODEFICIENCY VIRUS
HPKVSSEV

SEQ ID NO: 5433 - protein, 8 aa, HUMAN IMMUNODEFICIENCY VIRUS
HPRISSEV

SEQ ID NO: 5434 - protein, 8 aa, HUMAN IMMUNODEFICIENCY VIRUS
IPLGDARL

SEQ ID NO: 5435 - protein, 8 aa, HUMAN IMMUNODEFICIENCY VIRUS
IPLGEARL

SEQ ID NO: 5436 - protein, 8 aa, HUMAN IMMUNODEFICIENCY VIRUS
DPDLADQL

SEQ ID NO: 5437 - protein, 8 aa, HUMAN IMMUNODEFICIENCY VIRUS
DPGLADQL

SEQ ID NO: 5438 - protein, 8 aa, HUMAN IMMUNODEFICIENCY VIRUS
SPRCEYQA

SEQ ID NO: 5439 - protein, 9 aa, HUMAN IMMUNODEFICIENCY VIRUS
IPLGDARLV

SEQ ID NO: 5440 - protein, 9 aa, HUMAN IMMUNODEFICIENCY VIRUS
IPLGEARLV

SEQ ID NO: 5441 - protein, 9 aa, HUMAN IMMUNODEFICIENCY VIRUS
DPDLADQLI

SEQ ID NO: 5442 - protein, 9 aa, HUMAN IMMUNODEFICIENCY VIRUS
DPGLADQLI

SEQ ID NO: 5443 - protein, 9 aa, HUMAN IMMUNODEFICIENCY VIRUS
KPKKIKPPL

SEQ ID NO: 5444 - protein, 9 aa, HUMAN IMMUNODEFICIENCY VIRUS
PPLPSVKKL

SEQ ID NO: 5445 - protein, 9 aa, HUMAN IMMUNODEFICIENCY VIRUS
PPLPSVRKL

SEQ ID NO: 5446 - protein, 10 aa, HUMAN IMMUNODEFICIENCY VIRUS
HPKISSEVHI

SEQ ID NO: 5447 - protein, 10 aa, HUMAN IMMUNODEFICIENCY VIRUS
HPKVSSEVHI

SEQ ID NO: 5448 - protein, 10 aa, HUMAN IMMUNODEFICIENCY VIRUS
HPRISSEVHI

SEQ ID NO: 5449 - protein, 10 aa, HUMAN IMMUNODEFICIENCY VIRUS
IPLGEARLVI

SEQ ID NO: 5450 - protein, 10 aa, HUMAN IMMUNODEFICIENCY VIRUS
KPPLPSVKKL

SEQ ID NO: 5451 - protein, 11 aa, HUMAN IMMUNODEFICIENCY VIRUS
DPDLADQLIHL

SEQ ID NO: 5452 - protein, 8 aa, HUMAN IMMUNODEFICIENCY VIRUS
EPYNEWTL

SEQ ID NO: 5453 - protein, 9 aa, HUMAN IMMUNODEFICIENCY VIRUS
FPRIWLHSL

SEQ ID NO: 5454 - protein, 9 aa, HUMAN IMMUNODEFICIENCY VIRUS
FPRPWLHGL

SEQ ID NO: 5455 - protein, 10 aa, HUMAN IMMUNODEFICIENCY VIRUS
GPQREPYNEW

SEQ ID NO: 5456 - protein, 10 aa, HUMAN IMMUNODEFICIENCY VIRUS
EPYNEWTLEL

SEQ ID NO: 5457 - protein, 10 aa, HUMAN IMMUNODEFICIENCY VIRUS
RPWLHGLGQY

SEQ ID NO: 5458 - protein, 11 aa, HUMAN IMMUNODEFICIENCY VIRUS
EPYNEWTLELL

SEQ ID NO: 5459 - protein, 11 aa, HUMAN IMMUNODEFICIENCY VIRUS
RPWLHGLGQHI

SEQ ID NO: 5460 - protein, 8 aa, HUMAN IMMUNODEFICIENCY VIRUS
APWDVDDL

SEQ ID NO: 5461 - protein, 8 aa, HUMAN IMMUNODEFICIENCY VIRUS
KKLWTLYL

SEQ ID NO: 5462 - protein, 8 aa, HUMAN IMMUNODEFICIENCY VIRUS
RKSWSLYI

SEQ ID NO: 5463 - protein, 8 aa, HUMAN IMMUNODEFICIENCY VIRUS
WRWGTLFL

SEQ ID NO: 5464 - protein, 8 aa, HUMAN IMMUNODEFICIENCY VIRUS
WRWGTMLL

SEQ ID NO: 5465 - protein, 8 aa, HUMAN IMMUNODEFICIENCY VIRUS
EKLWVTVY

SEQ ID NO: 5466 - protein, 8 aa, HUMAN IMMUNODEFICIENCY VIRUS
WKEATTTL

SEQ ID NO: 5467 - protein, 8 aa, HUMAN IMMUNODEFICIENCY VIRUS
MHEDIISL

SEQ ID NO: 5468 - protein, 8 aa, HUMAN IMMUNODEFICIENCY VIRUS
IKNCSFNI

SEQ ID NO: 5469 - protein, 8 aa, HUMAN IMMUNODEFICIENCY VIRUS
PKVSFEPI

SEQ ID NO: 5470 - protein, 8 aa, HUMAN IMMUNODEFICIENCY VIRUS
LKCNDKKF

SEQ ID NO: 5471 - protein, 8 aa, HUMAN IMMUNODEFICIENCY VIRUS
AKTIIVQL

SEQ ID NO: 5472 - protein, 8 aa, HUMAN IMMUNODEFICIENCY VIRUS
QRGPGRAF

SEQ ID NO: 5473 - protein, 8 aa, HUMAN IMMUNODEFICIENCY VIRUS
KKKKTGYI

SEQ ID NO: 5474 - protein, 8 aa, HUMAN IMMUNODEFICIENCY VIRUS
IRQAHCNI

SEQ ID NO: 5475 - protein, 8 aa, HUMAN IMMUNODEFICIENCY VIRUS
IKQIINMW

SEQ ID NO: 5476 - protein, 8 aa, HUMAN IMMUNODEFICIENCY VIRUS
IKQIVNMW

SEQ ID NO: 5477 - protein, 8 aa, HUMAN IMMUNODEFICIENCY VIRUS
QRVGQAMY

SEQ ID NO: 5478 - protein, 8 aa, HUMAN IMMUNODEFICIENCY VIRUS
FRPGGGDM

SEQ ID NO: 5479 - protein, 8 aa, HUMAN IMMUNODEFICIENCY VIRUS
WRSELYKY

SEQ ID NO: 5480 - protein, 8 aa, HUMAN IMMUNODEFICIENCY VIRUS
YKYKVVEI

SEQ ID NO: 5481 - protein, 8 aa, HUMAN IMMUNODEFICIENCY VIRUS
YKYKVVKI

SEQ ID NO: 5482 - protein, 8 aa, HUMAN IMMUNODEFICIENCY VIRUS
ARQLLSGI

SEQ ID NO: 5483 - protein, 8 aa, HUMAN IMMUNODEFICIENCY VIRUS
VRQLLSGI

SEQ ID NO: 5484 - protein, 8 aa, HUMAN IMMUNODEFICIENCY VIRUS
LKLTVWGI

SEQ ID NO: 5485 - protein, 8 aa, HUMAN IMMUNODEFICIENCY VIRUS
EKNEQDLL

SEQ ID NO: 5486 - protein, 8 aa, HUMAN IMMUNODEFICIENCY VIRUS
EKNEQELL

SEQ ID NO: 5487 - protein, 8 aa, HUMAN IMMUNODEFICIENCY VIRUS
LRIIFAVL

SEQ ID NO: 5488 - protein, 8 aa, HUMAN IMMUNODEFICIENCY VIRUS
LRIVFAVL

SEQ ID NO: 5489 - protein, 8 aa, HUMAN IMMUNODEFICIENCY VIRUS
VRQGYSPL

SEQ ID NO: 5490 - protein, 8 aa, HUMAN IMMUNODEFICIENCY VIRUS
IRLVNGFL

SEQ ID NO: 5491 - protein, 8 aa, HUMAN IMMUNODEFICIENCY VIRUS
IRLVSGFL

SEQ ID NO: 5492 - protein, 8 aa, HUMAN IMMUNODEFICIENCY VIRUS
YHRLRDFI

SEQ ID NO: 5493 - protein, 8 aa, HUMAN IMMUNODEFICIENCY VIRUS
YHRLRDLL

SEQ ID NO: 5494 - protein, 8 aa, HUMAN IMMUNODEFICIENCY VIRUS
HRLRDFIL

SEQ ID NO: 5495 - protein, 8 aa, HUMAN IMMUNODEFICIENCY VIRUS
HRLRDLLL

SEQ ID NO: 5496 - protein, 8 aa, HUMAN IMMUNODEFICIENCY VIRUS
GRRGWEAL

SEQ ID NO: 5497 - protein, 8 aa, HUMAN IMMUNODEFICIENCY VIRUS
LKGLRLGW

SEQ ID NO: 5498 - protein, 8 aa, HUMAN IMMUNODEFICIENCY VIRUS
LRGLQRGW

SEQ ID NO: 5499 - protein, 8 aa, HUMAN IMMUNODEFICIENCY VIRUS
LRLGWEGL

SEQ ID NO: 5500 - protein, 8 aa, HUMAN IMMUNODEFICIENCY VIRUS
LKYLWNLL

SEQ ID NO: 5501 - protein, 8 aa, HUMAN IMMUNODEFICIENCY VIRUS
LKYWWNLL

SEQ ID NO: 5502 - protein, 8 aa, HUMAN IMMUNODEFICIENCY VIRUS
LKNSAINL

SEQ ID NO: 5503 - protein, 8 aa, HUMAN IMMUNODEFICIENCY VIRUS
LKNSAISL

SEQ ID NO: 5504 - protein, 8 aa, HUMAN IMMUNODEFICIENCY VIRUS
LKNSAVSL

SEQ ID NO: 5505 - protein, 8 aa, HUMAN IMMUNODEFICIENCY VIRUS
PRRIRQGF

SEQ ID NO: 5506 - protein, 8 aa, HUMAN IMMUNODEFICIENCY VIRUS
PRRIRQGL

SEQ ID NO: 5507 - protein, 9 aa, HUMAN IMMUNODEFICIENCY VIRUS
GKDLWVTVY

SEQ ID NO: 5508 - protein, 9 aa, HUMAN IMMUNODEFICIENCY VIRUS
EKLWVTVYY

SEQ ID NO: 5509 - protein, 9 aa, HUMAN IMMUNODEFICIENCY VIRUS
WKEATTTLF

SEQ ID NO: 5510 - protein, 9 aa, HUMAN IMMUNODEFICIENCY VIRUS
WKNNMVEQM

SEQ ID NO: 5511 - protein, 9 aa, HUMAN IMMUNODEFICIENCY VIRUS
MHEDIISLW

SEQ ID NO: 5512 - protein, 9 aa, HUMAN IMMUNODEFICIENCY VIRUS
GKNEINDTY

SEQ ID NO: 5513 - protein, 9 aa, HUMAN IMMUNODEFICIENCY VIRUS
IHYCAPAGF

SEQ ID NO: 5514 - protein, 9 aa, HUMAN IMMUNODEFICIENCY VIRUS
IHYCTPAGF

SEQ ID NO: 5515 - protein, 9 aa, HUMAN IMMUNODEFICIENCY VIRUS
IKPVVSTQL

SEQ ID NO: 5516 - protein, 9 aa, HUMAN IMMUNODEFICIENCY VIRUS
IRPVVSTQL

SEQ ID NO: 5517 - protein, 9 aa, HUMAN IMMUNODEFICIENCY VIRUS
CRIKQIINM

SEQ ID NO: 5518 - protein, 9 aa, HUMAN IMMUNODEFICIENCY VIRUS
CRIKQIVNM

SEQ ID NO: 5519 - protein, 9 aa, HUMAN IMMUNODEFICIENCY VIRUS
GKAMYAPPI

SEQ ID NO: 5520 - protein, 9 aa, HUMAN IMMUNODEFICIENCY VIRUS
GRAMYAPPI

SEQ ID NO: 5521 - protein, 9 aa, HUMAN IMMUNODEFICIENCY VIRUS
MRDNWRSEL

SEQ ID NO: 5522 - protein, 9 aa, HUMAN IMMUNODEFICIENCY VIRUS
YKVVKIEPL

SEQ ID NO: 5523 - protein, 9 aa, HUMAN IMMUNODEFICIENCY VIRUS
EREKRAVGI

SEQ ID NO: 5524 - protein, 9 aa, HUMAN IMMUNODEFICIENCY VIRUS
QHLLKLTVW

SEQ ID NO: 5525 - protein, 9 aa, HUMAN IMMUNODEFICIENCY VIRUS
QHLLQLTVW

SEQ ID NO: 5526 - protein, 9 aa, HUMAN IMMUNODEFICIENCY VIRUS
QHMLQLTVW

SEQ ID NO: 5527 - protein, 9 aa, HUMAN IMMUNODEFICIENCY VIRUS
IKQLQARVL

SEQ ID NO: 5528 - protein, 9 aa, HUMAN IMMUNODEFICIENCY VIRUS
ARVLAVERY

SEQ ID NO: 5529 - protein, 9 aa, HUMAN IMMUNODEFICIENCY VIRUS
ERYLKDQQL

SEQ ID NO: 5530 - protein, 9 aa, HUMAN IMMUNODEFICIENCY VIRUS
ERYLRDQQL

SEQ ID NO: 5531 - protein, 9 aa, HUMAN IMMUNODEFICIENCY VIRUS
LKDQQLLGI

SEQ ID NO: 5532 - protein, 9 aa, HUMAN IMMUNODEFICIENCY VIRUS
LRDQQLLGI

SEQ ID NO: 5533 - protein, 9 aa, HUMAN IMMUNODEFICIENCY VIRUS
DKWASLWNW

SEQ ID NO: 5534 - protein, 9 aa, HUMAN IMMUNODEFICIENCY VIRUS
TKWLWYIKI

SEQ ID NO: 5535 - protein, 9 aa, HUMAN IMMUNODEFICIENCY VIRUS
LRNLCLFSY

SEQ ID NO: 5536 - protein, 9 aa, HUMAN IMMUNODEFICIENCY VIRUS
LRSLCLFSY

SEQ ID NO: 5537 - protein, 9 aa, HUMAN IMMUNODEFICIENCY VIRUS
YHRLRDFIL

SEQ ID NO: 5538 - protein, 9 aa, HUMAN IMMUNODEFICIENCY VIRUS
YHRLRDLLL

SEQ ID NO: 5539 - protein, 9 aa, HUMAN IMMUNODEFICIENCY VIRUS
HRLRDLLLI

SEQ ID NO: 5540 - protein, 9 aa, HUMAN IMMUNODEFICIENCY VIRUS
LKNSAVSLL

SEQ ID NO: 5541 - protein, 9 aa, HUMAN IMMUNODEFICIENCY VIRUS
IRQGLERAL

SEQ ID NO: 5542 - protein, 10 aa, HUMAN IMMUNODEFICIENCY VIRUS
KKLWTLYLAM

SEQ ID NO: 5543 - protein, 10 aa, HUMAN IMMUNODEFICIENCY VIRUS
RKSWSLYIAM

SEQ ID NO: 5544 - protein, 10 aa, HUMAN IMMUNODEFICIENCY VIRUS
WRWGTLFLGM

SEQ ID NO: 5545 - protein, 10 aa, HUMAN IMMUNODEFICIENCY VIRUS
WRWGTMLLGM

SEQ ID NO: 5546 - protein, 10 aa, HUMAN IMMUNODEFICIENCY VIRUS
GKDLWVTVYY

SEQ ID NO: 5547 - protein, 10 aa, HUMAN IMMUNODEFICIENCY VIRUS
LKPCVKLTPL

SEQ ID NO: 5548 - protein, 10 aa, HUMAN IMMUNODEFICIENCY VIRUS
VKLTPLCVTL

SEQ ID NO: 5549 - protein, 10 aa, HUMAN IMMUNODEFICIENCY VIRUS
PKVSFEPIPI

SEQ ID NO: 5550 - protein, 10 aa, HUMAN IMMUNODEFICIENCY VIRUS
IKPVVSTQLL

SEQ ID NO: 5551 - protein, 10 aa, HUMAN IMMUNODEFICIENCY VIRUS
IRPVVSTQLL

SEQ ID NO: 5552 - protein, 10 aa, HUMAN IMMUNODEFICIENCY VIRUS
MHSFNCGGEF

SEQ ID NO: 5553 - protein, 10 aa, HUMAN IMMUNODEFICIENCY VIRUS
THSFNCGGEF

SEQ ID NO: 5554 - protein, 10 aa, HUMAN IMMUNODEFICIENCY VIRUS
THSFNCRGEF

SEQ ID NO: 5555 - protein, 10 aa, HUMAN IMMUNODEFICIENCY VIRUS
CRIKQIINMW

SEQ ID NO: 5556 - protein, 10 aa, HUMAN IMMUNODEFICIENCY VIRUS
CRIKQIVNMW

SEQ ID NO: 5557 - protein, 10 aa, HUMAN IMMUNODEFICIENCY VIRUS
IRCSSNITGL

SEQ ID NO: 5558 - protein, 10 aa, HUMAN IMMUNODEFICIENCY VIRUS
MRDNWRSELY

SEQ ID NO: 5559 - protein, 10 aa, HUMAN IMMUNODEFICIENCY VIRUS
KRAVGIGAVF

SEQ ID NO: 5560 - protein, 10 aa, HUMAN IMMUNODEFICIENCY VIRUS
LRAIEAQQHL

SEQ ID NO: 5561 - protein, 10 aa, HUMAN IMMUNODEFICIENCY VIRUS
ARVLAVERYL

SEQ ID NO: 5562 - protein, 10 aa, HUMAN IMMUNODEFICIENCY VIRUS
ERYLKDQQLL

SEQ ID NO: 5563 - protein, 10 aa, HUMAN IMMUNODEFICIENCY VIRUS
ERYLRDQQLL

SEQ ID NO: 5564 - protein, 10 aa, HUMAN IMMUNODEFICIENCY VIRUS
LKDQQLLGIW

SEQ ID NO: 5565 - protein, 10 aa, HUMAN IMMUNODEFICIENCY VIRUS
LRDQQLLGIW

SEQ ID NO: 5566 - protein, 10 aa, HUMAN IMMUNODEFICIENCY VIRUS
EKNEQDLLAL

SEQ ID NO: 5567 - protein, 10 aa, HUMAN IMMUNODEFICIENCY VIRUS
EKNEQELLEL

SEQ ID NO: 5568 - protein, 10 aa, HUMAN IMMUNODEFICIENCY VIRUS
DKWASLWNWF

SEQ ID NO: 5569 - protein, 10 aa, HUMAN IMMUNODEFICIENCY VIRUS
TKWLWYIKIF

SEQ ID NO: 5570 - protein, 10 aa, HUMAN IMMUNODEFICIENCY VIRUS
LRIIFAVLSI

SEQ ID NO: 5571 - protein, 10 aa, HUMAN IMMUNODEFICIENCY VIRUS
LRIVFAVLSI

SEQ ID NO: 5572 - protein, 10 aa, HUMAN IMMUNODEFICIENCY VIRUS
NRVRQGYSPL

SEQ ID NO: 5573 - protein, 10 aa, HUMAN IMMUNODEFICIENCY VIRUS
VRQGYSPLSF

SEQ ID NO: 5574 - protein, 10 aa, HUMAN IMMUNODEFICIENCY VIRUS
PRGPDRPEGI

SEQ ID NO: 5575 - protein, 10 aa, HUMAN IMMUNODEFICIENCY VIRUS
IRLVSGFLAL

SEQ ID NO: 5576 - protein, 10 aa, HUMAN IMMUNODEFICIENCY VIRUS
YHRLRDLLLI

SEQ ID NO: 5577 - protein, 10 aa, HUMAN IMMUNODEFICIENCY VIRUS
LRLGWEGLKY

SEQ ID NO: 5578 - protein, 10 aa, HUMAN IMMUNODEFICIENCY VIRUS
LKYWWNLLQY

SEQ ID NO: 5579 - protein, 10 aa, HUMAN IMMUNODEFICIENCY VIRUS
IRQGLERALL

SEQ ID NO: 5580 - protein, 11 aa, HUMAN IMMUNODEFICIENCY VIRUS
WRWGTLFLGML

SEQ ID NO: 5581 - protein, 11 aa, HUMAN IMMUNODEFICIENCY VIRUS
WRWGTMLLGML

SEQ ID NO: 5582 - protein, 11 aa, HUMAN IMMUNODEFICIENCY VIRUS
YRLINCNTSAI

SEQ ID NO: 5583 - protein, 11 aa, HUMAN IMMUNODEFICIENCY VIRUS
IHYCAPAGFAI

SEQ ID NO: 5584 - protein, 11 aa, HUMAN IMMUNODEFICIENCY VIRUS
IKPVVSTQLLL

SEQ ID NO: 5585 - protein, 11 aa, HUMAN IMMUNODEFICIENCY VIRUS
IRPVVSTQLLL

SEQ ID NO: 5586 - protein, 11 aa, HUMAN IMMUNODEFICIENCY VIRUS
TRPNNNTRKSI

SEQ ID NO: 5587 - protein, 11 aa, HUMAN IMMUNODEFICIENCY VIRUS
QRGPGRAFVTI

SEQ ID NO: 5588 - protein, 11 aa, HUMAN IMMUNODEFICIENCY VIRUS
MHSFNCGGEFF

SEQ ID NO: 5589 - protein, 11 aa, HUMAN IMMUNODEFICIENCY VIRUS
THSFNCGGEFF

SEQ ID NO: 5590 - protein, 11 aa, HUMAN IMMUNODEFICIENCY VIRUS
THSFNCRGEFF

SEQ ID NO: 5591 - protein, 11 aa, HUMAN IMMUNODEFICIENCY VIRUS
IRCSSNITGLL

SEQ ID NO: 5592 - protein, 11 aa, HUMAN IMMUNODEFICIENCY VIRUS
YKYKVVKIEPL

SEQ ID NO: 5593 - protein, 11 aa, HUMAN IMMUNODEFICIENCY VIRUS
EKRAVGIGAVF

SEQ ID NO: 5594 - protein, 11 aa, HUMAN IMMUNODEFICIENCY VIRUS
KRAVGIGAVFL

SEQ ID NO: 5595 - protein, 11 aa, HUMAN IMMUNODEFICIENCY VIRUS
LRAIEAQQHLL

SEQ ID NO: 5596 - protein, 11 aa, HUMAN IMMUNODEFICIENCY VIRUS
QHLLKLTVWGI

SEQ ID NO: 5597 - protein, 11 aa, HUMAN IMMUNODEFICIENCY VIRUS
QHLLQLTVWGI

SEQ ID NO: 5598 - protein, 11 aa, HUMAN IMMUNODEFICIENCY VIRUS
LKLTVWGIKQL

SEQ ID NO: 5599 - protein, 11 aa, HUMAN IMMUNODEFICIENCY VIRUS
GKLICTTAVPW

SEQ ID NO: 5600 - protein, 11 aa, HUMAN IMMUNODEFICIENCY VIRUS
GKLICTTNVPW

SEQ ID NO: 5601 - protein, 11 aa, HUMAN IMMUNODEFICIENCY VIRUS
GKLICTTTVPW

SEQ ID NO: 5602 - protein, 11 aa, HUMAN IMMUNODEFICIENCY VIRUS
TKWLWYIKIFI

SEQ ID NO: 5603 - protein, 11 aa, HUMAN IMMUNODEFICIENCY VIRUS
IKIFIMIVGGL

SEQ ID NO: 5604 - protein, 11 aa, HUMAN IMMUNODEFICIENCY VIRUS
LKGLRLGWEGL

SEQ ID NO: 5605 - protein, 11 aa, HUMAN IMMUNODEFICIENCY VIRUS
LRLGWEGLKYL

SEQ ID NO: 5606 - protein, 11 aa, HUMAN IMMUNODEFICIENCY VIRUS
LKYWWNLLQYW

SEQ ID NO: 5607 - protein, 11 aa, HUMAN IMMUNODEFICIENCY VIRUS
LHIPRRIRQGL

SEQ ID NO: 5608 - protein, 11 aa, HUMAN IMMUNODEFICIENCY VIRUS
RRIRQGLERAL

SEQ ID NO: 5609 - protein, 11 aa, HUMAN IMMUNODEFICIENCY VIRUS
TRIRQGLERAL

SEQ ID NO: 5610 - protein, 8 aa, HUMAN IMMUNODEFICIENCY VIRUS
DKWEKIRL

SEQ ID NO: 5611 - protein, 8 aa, HUMAN IMMUNODEFICIENCY VIRUS
KKYKLKHI

SEQ ID NO: 5612 - protein, 8 aa, HUMAN IMMUNODEFICIENCY VIRUS
KKYRLKHL

SEQ ID NO: 5613 - protein, 8 aa, HUMAN IMMUNODEFICIENCY VIRUS
YKLKHIVW

SEQ ID NO: 5614 - protein, 8 aa, HUMAN IMMUNODEFICIENCY VIRUS
YRLKHLVW

SEQ ID NO: 5615 - protein, 8 aa, HUMAN IMMUNODEFICIENCY VIRUS
CRQILGQL

SEQ ID NO: 5616 - protein, 8 aa, HUMAN IMMUNODEFICIENCY VIRUS
IKDTKEAL

SEQ ID NO: 5617 - protein, 8 aa, HUMAN IMMUNODEFICIENCY VIRUS
VKDTKEAL

SEQ ID NO: 5618 - protein, 8 aa, HUMAN IMMUNODEFICIENCY VIRUS
VRDTKEAL

SEQ ID NO: 5619 - protein, 8 aa, HUMAN IMMUNODEFICIENCY VIRUS
TKEALDKI

SEQ ID NO: 5620 - protein, 8 aa, HUMAN IMMUNODEFICIENCY VIRUS
TKEALEKI

SEQ ID NO: 5621 - protein, 8 aa, HUMAN IMMUNODEFICIENCY VIRUS
GHQAAMQM

SEQ ID NO: 5622 - protein, 8 aa, HUMAN IMMUNODEFICIENCY VIRUS
KRWIILGL

SEQ ID NO: 5623 - protein, 8 aa, HUMAN IMMUNODEFICIENCY VIRUS
PKEPFRDY

SEQ ID NO: 5624 - protein, 8 aa, HUMAN IMMUNODEFICIENCY VIRUS
FRDYVDRF

SEQ ID NO: 5625 - protein, 8 aa, HUMAN IMMUNODEFICIENCY VIRUS
CKTILKAL

SEQ ID NO: 5626 - protein, 8 aa, HUMAN IMMUNODEFICIENCY VIRUS
CKTILRAL

SEQ ID NO: 5627 - protein, 8 aa, HUMAN IMMUNODEFICIENCY VIRUS
ARVLAEAM

SEQ ID NO: 5628 - protein, 8 aa, HUMAN IMMUNODEFICIENCY VIRUS
HKGRPGNF

SEQ ID NO: 5629 - protein, 8 aa, HUMAN IMMUNODEFICIENCY VIRUS
NKGRPGNF

SEQ ID NO: 5630 - protein, 8 aa, HUMAN IMMUNODEFICIENCY VIRUS
SKGRPGNF

SEQ ID NO: 5631 - protein, 8 aa, HUMAN IMMUNODEFICIENCY VIRUS
LKDKEPPL

SEQ ID NO: 5632 - protein, 8 aa, HUMAN IMMUNODEFICIENCY VIRUS
ERTENSLY

SEQ ID NO: 5633 - protein, 8 aa, HUMAN IMMUNODEFICIENCY VIRUS
EKEEKGLY

SEQ ID NO: 5634 - protein, 9 aa, HUMAN IMMUNODEFICIENCY VIRUS
GKLDAWEKI

SEQ ID NO: 5635 - protein, 9 aa, HUMAN IMMUNODEFICIENCY VIRUS
LRPGGKKKY

SEQ ID NO: 5636 - protein, 9 aa, HUMAN IMMUNODEFICIENCY VIRUS
KKKYRLKHL

SEQ ID NO: 5637 - protein, 9 aa, HUMAN IMMUNODEFICIENCY VIRUS
SRELERFAL

SEQ ID NO: 5638 - protein, 9 aa, HUMAN IMMUNODEFICIENCY VIRUS
ERFALNPGL

SEQ ID NO: 5639 - protein, 9 aa, HUMAN IMMUNODEFICIENCY VIRUS
ERFAVNPGL

SEQ ID NO: 5640 - protein, 9 aa, HUMAN IMMUNODEFICIENCY VIRUS
VKVIEEKAF

SEQ ID NO: 5641 - protein, 9 aa, HUMAN IMMUNODEFICIENCY VIRUS
VKVVEEKAF

SEQ ID NO: 5642 - protein, 9 aa, HUMAN IMMUNODEFICIENCY VIRUS
EKAFSPEVI

SEQ ID NO: 5643 - protein, 9 aa, HUMAN IMMUNODEFICIENCY VIRUS
GHQAAMQML

SEQ ID NO: 5644 - protein, 9 aa, HUMAN IMMUNODEFICIENCY VIRUS
LHPVHAGPI

SEQ ID NO: 5645 - protein, 9 aa, HUMAN IMMUNODEFICIENCY VIRUS
VHPVHAGPI

SEQ ID NO: 5646 - protein, 9 aa, HUMAN IMMUNODEFICIENCY VIRUS
MREPRGSDI

SEQ ID NO: 5647 - protein, 9 aa, HUMAN IMMUNODEFICIENCY VIRUS
YKRWIILGL

SEQ ID NO: 5648 - protein, 9 aa, HUMAN IMMUNODEFICIENCY VIRUS
VRMYSPTSI

SEQ ID NO: 5649 - protein, 9 aa, HUMAN IMMUNODEFICIENCY VIRUS
VRMYSPVSI

SEQ ID NO: 5650 - protein, 9 aa, HUMAN IMMUNODEFICIENCY VIRUS
IKQGPKEPF

SEQ ID NO: 5651 - protein, 9 aa, HUMAN IMMUNODEFICIENCY VIRUS
IRQGPKEPF

SEQ ID NO: 5652 - protein, 9 aa, HUMAN IMMUNODEFICIENCY VIRUS
FRDYVDRFF

SEQ ID NO: 5653 - protein, 9 aa, HUMAN IMMUNODEFICIENCY VIRUS
FRDYVDRFY

SEQ ID NO: 5654 - protein, 9 aa, HUMAN IMMUNODEFICIENCY VIRUS
VKNWMTDTL

SEQ ID NO: 5655 - protein, 9 aa, HUMAN IMMUNODEFICIENCY VIRUS
VKNWMTETL

SEQ ID NO: 5656 - protein, 9 aa, HUMAN IMMUNODEFICIENCY VIRUS
SHKGRPGNF

SEQ ID NO: 5657 - protein, 9 aa, HUMAN IMMUNODEFICIENCY VIRUS
HKGRPGNFL

SEQ ID NO: 5658 - protein, 9 aa, HUMAN IMMUNODEFICIENCY VIRUS
NKGRPGNFL

SEQ ID NO: 5659 - protein, 9 aa, HUMAN IMMUNODEFICIENCY VIRUS
RKEPTAPPL

SEQ ID NO: 5660 - protein, 9 aa, HUMAN IMMUNODEFICIENCY VIRUS
DKDKELYPL

SEQ ID NO: 5661 - protein, 10 aa, HUMAN IMMUNODEFICIENCY VIRUS
GKKKYRLKHL

SEQ ID NO: 5662 - protein, 10 aa, HUMAN IMMUNODEFICIENCY VIRUS
KKYKLKHIVW

SEQ ID NO: 5663 - protein, 10 aa, HUMAN IMMUNODEFICIENCY VIRUS
KKYRLKHLVW

SEQ ID NO: 5664 - protein, 10 aa, HUMAN IMMUNODEFICIENCY VIRUS
KHIVWASREL

SEQ ID NO: 5665 - protein, 10 aa, HUMAN IMMUNODEFICIENCY VIRUS
KHLVWASREL

SEQ ID NO: 5666 - protein, 10 aa, HUMAN IMMUNODEFICIENCY VIRUS
ERFALNPGLL

SEQ ID NO: 5667 - protein, 10 aa, HUMAN IMMUNODEFICIENCY VIRUS
ERFAVNPGLL

SEQ ID NO: 5668 - protein, 10 aa, HUMAN IMMUNODEFICIENCY VIRUS
VHQAISPRTL

SEQ ID NO: 5669 - protein, 10 aa, HUMAN IMMUNODEFICIENCY VIRUS
VHQALSPRTL

SEQ ID NO: 5670 - protein, 10 aa, HUMAN IMMUNODEFICIENCY VIRUS
VRMYSPTSIL

SEQ ID NO: 5671 - protein, 10 aa, HUMAN IMMUNODEFICIENCY VIRUS
VRMYSPVSIL

SEQ ID NO: 5672 - protein, 10 aa, HUMAN IMMUNODEFICIENCY VIRUS
VKNWMTDTLL

SEQ ID NO: 5673 - protein, 10 aa, HUMAN IMMUNODEFICIENCY VIRUS
VKNWMTETLL

SEQ ID NO: 5674 - protein, 10 aa, HUMAN IMMUNODEFICIENCY VIRUS
LKALGPAATL

SEQ ID NO: 5675 - protein, 10 aa, HUMAN IMMUNODEFICIENCY VIRUS
HKARVLAEAM

SEQ ID NO: 5676 - protein, 10 aa, HUMAN IMMUNODEFICIENCY VIRUS
CRAPRKKGCW

SEQ ID NO: 5677 - protein, 10 aa, HUMAN IMMUNODEFICIENCY VIRUS
WKCGKEGHQM

SEQ ID NO: 5678 - protein, 10 aa, HUMAN IMMUNODEFICIENCY VIRUS
ERQANFLGKI

SEQ ID NO: 5679 - protein, 10 aa, HUMAN IMMUNODEFICIENCY VIRUS
SHKGRPGNFL

SEQ ID NO: 5680 - protein, 10 aa, HUMAN IMMUNODEFICIENCY VIRUS
TRKEPTAPPL

SEQ ID NO: 5681 - protein, 10 aa, HUMAN IMMUNODEFICIENCY VIRUS
QKQEPIDKEL

SEQ ID NO: 5682 - protein, 10 aa, HUMAN IMMUNODEFICIENCY VIRUS
EKEEKGLYPL

SEQ ID NO: 5683 - protein, 10 aa, HUMAN IMMUNODEFICIENCY VIRUS
DKELYPLASL

SEQ ID NO: 5684 - protein, 10 aa, HUMAN IMMUNODEFICIENCY VIRUS
DKELYPLTSL

SEQ ID NO: 5685 - protein, 10 aa, HUMAN IMMUNODEFICIENCY VIRUS
LKSLFGNDPL

SEQ ID NO: 5686 - protein, 11 aa, HUMAN IMMUNODEFICIENCY VIRUS
ARASVLSGGEL

SEQ ID NO: 5687 - protein, 11 aa, HUMAN IMMUNODEFICIENCY VIRUS
ARASVLSGGKL

SEQ ID NO: 5688 - protein, 11 aa, HUMAN IMMUNODEFICIENCY VIRUS
GKLDAWEKIRL

SEQ ID NO: 5689 - protein, 11 aa, HUMAN IMMUNODEFICIENCY VIRUS
IRLRPGGKKKY

SEQ ID NO: 5690 - protein, 11 aa, HUMAN IMMUNODEFICIENCY VIRUS
LRPGGKKKYKL

SEQ ID NO: 5691 - protein, 11 aa, HUMAN IMMUNODEFICIENCY VIRUS
LRPGGKKKYRL

SEQ ID NO: 5692 - protein, 11 aa, HUMAN IMMUNODEFICIENCY VIRUS
KKKYRLKHLVW

SEQ ID NO: 5693 - protein, 11 aa, HUMAN IMMUNODEFICIENCY VIRUS
LKHIVWASREL

SEQ ID NO: 5694 - protein, 11 aa, HUMAN IMMUNODEFICIENCY VIRUS
LKHLVWASREL

SEQ ID NO: 5695 - protein, 11 aa, HUMAN IMMUNODEFICIENCY VIRUS
LRSLYNTVATL

SEQ ID NO: 5696 - protein, 11 aa, HUMAN IMMUNODEFICIENCY VIRUS
VKDTKEALDKI

SEQ ID NO: 5697 - protein, 11 aa, HUMAN IMMUNODEFICIENCY VIRUS
PRTLNAWVKVI

SEQ ID NO: 5698 - protein, 11 aa, HUMAN IMMUNODEFICIENCY VIRUS
EKAFSPEVIPM

SEQ ID NO: 5699 - protein, 11 aa, HUMAN IMMUNODEFICIENCY VIRUS
DRLHPVHAGPI

SEQ ID NO: 5700 - protein, 11 aa, HUMAN IMMUNODEFICIENCY VIRUS
DRVHPVHAGPI

SEQ ID NO: 5701 - protein, 11 aa, HUMAN IMMUNODEFICIENCY VIRUS
VHAGPIAPGQM

SEQ ID NO: 5702 - protein, 11 aa, HUMAN IMMUNODEFICIENCY VIRUS
VHAGPIPPGQM

SEQ ID NO: 5703 - protein, 11 aa, HUMAN IMMUNODEFICIENCY VIRUS
KRWIILGLNKI

SEQ ID NO: 5704 - protein, 11 aa, HUMAN IMMUNODEFICIENCY VIRUS
GHKARVLAEAM

SEQ ID NO: 5705 - protein, 11 aa, HUMAN IMMUNODEFICIENCY VIRUS
SHKARVLAEAM

SEQ ID NO: 5706 - protein, 11 aa, HUMAN IMMUNODEFICIENCY VIRUS
MKDCTERQANF

SEQ ID NO: 5707 - protein, 11 aa, HUMAN IMMUNODEFICIENCY VIRUS
ERQANFLGKIW

SEQ ID NO: 5708 - protein, 11 aa, HUMAN IMMUNODEFICIENCY VIRUS
QKQEPIDKELY

SEQ ID NO: 5709 - protein, 11 aa, HUMAN IMMUNODEFICIENCY VIRUS
LKDKEPPLASL

SEQ ID NO: 5710 - protein, 11 aa, HUMAN IMMUNODEFICIENCY VIRUS
ERTENSLYPPL

SEQ ID NO: 5711 - protein, 8 aa, HUMAN IMMUNODEFICIENCY VIRUS
GKWSKSSI

SEQ ID NO: 5712 - protein, 8 aa, HUMAN IMMUNODEFICIENCY VIRUS
SKSSIVGW

SEQ ID NO: 5713 - protein, 8 aa, HUMAN IMMUNODEFICIENCY VIRUS
EKGGLDGL

SEQ ID NO: 5714 - protein, 8 aa, HUMAN IMMUNODEFICIENCY VIRUS
EKGGLEGL

SEQ ID NO: 5715 - protein, 8 aa, HUMAN IMMUNODEFICIENCY VIRUS
SKKRQEIL

SEQ ID NO: 5716 - protein, 8 aa, HUMAN IMMUNODEFICIENCY VIRUS
KRQDILDL

SEQ ID NO: 5717 - protein, 8 aa, HUMAN IMMUNODEFICIENCY VIRUS
KRQEILDL

SEQ ID NO: 5718 - protein, 8 aa, HUMAN IMMUNODEFICIENCY VIRUS
ARELHPEF

SEQ ID NO: 5719 - protein, 8 aa, HUMAN IMMUNODEFICIENCY VIRUS
ARELHPEY

SEQ ID NO: 5720 - protein, 9 aa, HUMAN IMMUNODEFICIENCY VIRUS
EKGGLDGLI

SEQ ID NO: 5721 - protein, 9 aa, HUMAN IMMUNODEFICIENCY VIRUS
EKGGLEGLI

SEQ ID NO: 5722 - protein, 9 aa, HUMAN IMMUNODEFICIENCY VIRUS
KKRQEILDL

SEQ ID NO: 5723 - protein, 9 aa, HUMAN IMMUNODEFICIENCY VIRUS
QKRQDILDL

SEQ ID NO: 5724 - protein, 9 aa, HUMAN IMMUNODEFICIENCY VIRUS
KRQDILDLW

SEQ ID NO: 5725 - protein, 9 aa, HUMAN IMMUNODEFICIENCY VIRUS
KRQEILDLW

SEQ ID NO: 5726 - protein, 9 aa, HUMAN IMMUNODEFICIENCY VIRUS
IRYPLTFGW

SEQ ID NO: 5727 - protein, 9 aa, HUMAN IMMUNODEFICIENCY VIRUS
TRFPLTFGW

SEQ ID NO: 5728 - protein, 9 aa, HUMAN IMMUNODEFICIENCY VIRUS
LHPICQHGM

SEQ ID NO: 5729 - protein, 9 aa, HUMAN IMMUNODEFICIENCY VIRUS
LHPMSQHGM

SEQ ID NO: 5730 - protein, 9 aa, HUMAN IMMUNODEFICIENCY VIRUS
ARELHPEFY

SEQ ID NO: 5731 - protein, 9 aa, HUMAN IMMUNODEFICIENCY VIRUS
ARELHPEYY

SEQ ID NO: 5732 - protein, 10 aa, HUMAN IMMUNODEFICIENCY VIRUS
SRDLEKHGAI

SEQ ID NO: 5733 - protein, 10 aa, HUMAN IMMUNODEFICIENCY VIRUS
VRPQVPLRPM

SEQ ID NO: 5734 - protein, 10 aa, HUMAN IMMUNODEFICIENCY VIRUS
LRPMTYKGAF

SEQ ID NO: 5735 - protein, 10 aa, HUMAN IMMUNODEFICIENCY VIRUS
SHFLKEKGGL

SEQ ID NO: 5736 - protein, 10 aa, HUMAN IMMUNODEFICIENCY VIRUS
LKEKGGLDGL

SEQ ID NO: 5737 - protein, 10 aa, HUMAN IMMUNODEFICIENCY VIRUS
LKEKGGLEGL

SEQ ID NO: 5738 - protein, 10 aa, HUMAN IMMUNODEFICIENCY VIRUS
EKGGLDGLIY

SEQ ID NO: 5739 - protein, 10 aa, HUMAN IMMUNODEFICIENCY VIRUS
EKGGLEGLIY

SEQ ID NO: 5740 - protein, 10 aa, HUMAN IMMUNODEFICIENCY VIRUS
SKKRQEILDL

SEQ ID NO: 5741 - protein, 10 aa, HUMAN IMMUNODEFICIENCY VIRUS
KKRQEILDLW

SEQ ID NO: 5742 - protein, 10 aa, HUMAN IMMUNODEFICIENCY VIRUS
QKRQDILDLW

SEQ ID NO: 5743 - protein, 10 aa, HUMAN IMMUNODEFICIENCY VIRUS
YHTQGFFPDW

SEQ ID NO: 5744 - protein, 10 aa, HUMAN IMMUNODEFICIENCY VIRUS
YHTQGYFPDW

SEQ ID NO: 5745 - protein, 11 aa, HUMAN IMMUNODEFICIENCY VIRUS
GKWSKSSIVGW

SEQ ID NO: 5746 - protein, 11 aa, HUMAN IMMUNODEFICIENCY VIRUS
LKEKGGLDGLI

SEQ ID NO: 5747 - protein, 11 aa, HUMAN IMMUNODEFICIENCY VIRUS
LKEKGGLEGLI

SEQ ID NO: 5748 - protein, 11 aa, HUMAN IMMUNODEFICIENCY VIRUS
SKKRQEILDLW

SEQ ID NO: 5749 - protein, 11 aa, HUMAN IMMUNODEFICIENCY VIRUS
KRQDILDLWVY

SEQ ID NO: 5750 - protein, 11 aa, HUMAN IMMUNODEFICIENCY VIRUS
KRQEILDLWVY

SEQ ID NO: 5751 - protein, 11 aa, HUMAN IMMUNODEFICIENCY VIRUS
TRFPLTFGWCF

SEQ ID NO: 5752 - protein, 8 aa, HUMAN IMMUNODEFICIENCY VIRUS
TRRELQVW

SEQ ID NO: 5753 - protein, 8 aa, HUMAN IMMUNODEFICIENCY VIRUS
GKWKPKMI

SEQ ID NO: 5754 - protein, 8 aa, HUMAN IMMUNODEFICIENCY VIRUS
GRWKPKMI

SEQ ID NO: 5755 - protein, 8 aa, HUMAN IMMUNODEFICIENCY VIRUS
VRQYDQIL

SEQ ID NO: 5756 - protein, 8 aa, HUMAN IMMUNODEFICIENCY VIRUS
HKAIGTVL

SEQ ID NO: 5757 - protein, 8 aa, HUMAN IMMUNODEFICIENCY VIRUS
KKAIGTVL

SEQ ID NO: 5758 - protein, 8 aa, HUMAN IMMUNODEFICIENCY VIRUS
GRNLLTQI

SEQ ID NO: 5759 - protein, 8 aa, HUMAN IMMUNODEFICIENCY VIRUS
GRNMLTQI

SEQ ID NO: 5760 - protein, 8 aa, HUMAN IMMUNODEFICIENCY VIRUS
GRNMLTQL

SEQ ID NO: 5761 - protein, 8 aa, HUMAN IMMUNODEFICIENCY VIRUS
PKVKQWPL

SEQ ID NO: 5762 - protein, 8 aa, HUMAN IMMUNODEFICIENCY VIRUS
KKKDSTKW

SEQ ID NO: 5763 - protein, 8 aa, HUMAN IMMUNODEFICIENCY VIRUS
NKRTQDFW

SEQ ID NO: 5764 - protein, 8 aa, HUMAN IMMUNODEFICIENCY VIRUS
KKKSVTVL

SEQ ID NO: 5765 - protein, 8 aa, HUMAN IMMUNODEFICIENCY VIRUS
RKYTAFTI

SEQ ID NO: 5766 - protein, 8 aa, HUMAN IMMUNODEFICIENCY VIRUS
IRYQYNVL

SEQ ID NO: 5767 - protein, 8 aa, HUMAN IMMUNODEFICIENCY VIRUS
WKGSPAIF

SEQ ID NO: 5768 - protein, 8 aa, HUMAN IMMUNODEFICIENCY VIRUS
FRKQNPDI

SEQ ID NO: 5769 - protein, 8 aa, HUMAN IMMUNODEFICIENCY VIRUS
HRAKIEEL

SEQ ID NO: 5770 - protein, 8 aa, HUMAN IMMUNODEFICIENCY VIRUS
HRTKIEEL

SEQ ID NO: 5771 - protein, 8 aa, HUMAN IMMUNODEFICIENCY VIRUS
LREHLLKW

SEQ ID NO: 5772 - protein, 8 aa, HUMAN IMMUNODEFICIENCY VIRUS
LRQHLLRW

SEQ ID NO: 5773 - protein, 8 aa, HUMAN IMMUNODEFICIENCY VIRUS
EHLLKWGF

SEQ ID NO: 5774 - protein, 8 aa, HUMAN IMMUNODEFICIENCY VIRUS
QHLLRWGF

SEQ ID NO: 5775 - protein, 8 aa, HUMAN IMMUNODEFICIENCY VIRUS
KHQKEPPF

SEQ ID NO: 5776 - protein, 8 aa, HUMAN IMMUNODEFICIENCY VIRUS
QKEPPFLW

SEQ ID NO: 5777 - protein, 8 aa, HUMAN IMMUNODEFICIENCY VIRUS
DKWTVQPI

SEQ ID NO: 5778 - protein, 8 aa, HUMAN IMMUNODEFICIENCY VIRUS
VKQLCKLL

SEQ ID NO: 5779 - protein, 8 aa, HUMAN IMMUNODEFICIENCY VIRUS
VRQLCKLL

SEQ ID NO: 5780 - protein, 8 aa, HUMAN IMMUNODEFICIENCY VIRUS
TKALTEVI

SEQ ID NO: 5781 - protein, 8 aa, HUMAN IMMUNODEFICIENCY VIRUS
SKDLIAEI

SEQ ID NO: 5782 - protein, 8 aa, HUMAN IMMUNODEFICIENCY VIRUS
QKQGQDQW

SEQ ID NO: 5783 - protein, 8 aa, HUMAN IMMUNODEFICIENCY VIRUS
QKQGQGQW

SEQ ID NO: 5784 - protein, 8 aa, HUMAN IMMUNODEFICIENCY VIRUS
QKIATESI

SEQ ID NO: 5785 - protein, 8 aa, HUMAN IMMUNODEFICIENCY VIRUS
GKTPKFKL

SEQ ID NO: 5786 - protein, 8 aa, HUMAN IMMUNODEFICIENCY VIRUS
GKTPKFRL

SEQ ID NO: 5787 - protein, 8 aa, HUMAN IMMUNODEFICIENCY VIRUS
QKETWEAW

SEQ ID NO: 5788 - protein, 8 aa, HUMAN IMMUNODEFICIENCY VIRUS
QKETWETW

SEQ ID NO: 5789 - protein, 8 aa, HUMAN IMMUNODEFICIENCY VIRUS
TKIGKAGY

SEQ ID NO: 5790 - protein, 8 aa, HUMAN IMMUNODEFICIENCY VIRUS
TKLGKAGY

SEQ ID NO: 5791 - protein, 8 aa, HUMAN IMMUNODEFICIENCY VIRUS
GRQKVVSL

SEQ ID NO: 5792 - protein, 8 aa, HUMAN IMMUNODEFICIENCY VIRUS
QKTELHAI

SEQ ID NO: 5793 - protein, 8 aa, HUMAN IMMUNODEFICIENCY VIRUS
QKTELQAI

SEQ ID NO: 5794 - protein, 8 aa, HUMAN IMMUNODEFICIENCY VIRUS
IKKEKVYL

SEQ ID NO: 5795 - protein, 8 aa, HUMAN IMMUNODEFICIENCY VIRUS
DKLVSAGI

SEQ ID NO: 5796 - protein, 8 aa, HUMAN IMMUNODEFICIENCY VIRUS
DKLVSSGI

SEQ ID NO: 5797 - protein, 8 aa, HUMAN IMMUNODEFICIENCY VIRUS
YHNNWRAM

SEQ ID NO: 5798 - protein, 8 aa, HUMAN IMMUNODEFICIENCY VIRUS
YHSNWRAM

SEQ ID NO: 5799 - protein, 8 aa, HUMAN IMMUNODEFICIENCY VIRUS
WRAMASDF

SEQ ID NO: 5800 - protein, 8 aa, HUMAN IMMUNODEFICIENCY VIRUS
THLEGKII

SEQ ID NO: 5801 - protein, 8 aa, HUMAN IMMUNODEFICIENCY VIRUS
THLEGKVI

SEQ ID NO: 5802 - protein, 8 aa, HUMAN IMMUNODEFICIENCY VIRUS
VHVASGYI

SEQ ID NO: 5803 - protein, 8 aa, HUMAN IMMUNODEFICIENCY VIRUS
GRWPVKTI

SEQ ID NO: 5804 - protein, 8 aa, HUMAN IMMUNODEFICIENCY VIRUS
GRWPVKVI

SEQ ID NO: 5805 - protein, 8 aa, HUMAN IMMUNODEFICIENCY VIRUS
NKELKKII

SEQ ID NO: 5806 - protein, 8 aa, HUMAN IMMUNODEFICIENCY VIRUS
VRDQAEHL

SEQ ID NO: 5807 - protein, 8 aa, HUMAN IMMUNODEFICIENCY VIRUS
VREQAEHL

SEQ ID NO: 5808 - protein, 8 aa, HUMAN IMMUNODEFICIENCY VIRUS
RKGGIGGY

SEQ ID NO: 5809 - protein, 8 aa, HUMAN IMMUNODEFICIENCY VIRUS
TKELQKQI

SEQ ID NO: 5810 - protein, 8 aa, HUMAN IMMUNODEFICIENCY VIRUS
YRDSRDPI

SEQ ID NO: 5811 - protein, 8 aa, HUMAN IMMUNODEFICIENCY VIRUS
YRDSRDPL

SEQ ID NO: 5812 - protein, 8 aa, HUMAN IMMUNODEFICIENCY VIRUS
WKGPAKLL

SEQ ID NO: 5813 - protein, 8 aa, HUMAN IMMUNODEFICIENCY VIRUS
PRRKAKII

SEQ ID NO: 5814 - protein, 8 aa, HUMAN IMMUNODEFICIENCY VIRUS
PRRKVKII

SEQ ID NO: 5815 - protein, 8 aa, HUMAN IMMUNODEFICIENCY VIRUS
IKDYGKQM

SEQ ID NO: 5816 - protein, 8 aa, HUMAN IMMUNODEFICIENCY VIRUS
IRDYGKQM

SEQ ID NO: 5817 - protein, 9 aa, HUMAN IMMUNODEFICIENCY VIRUS
QRPLVTIKI

SEQ ID NO: 5818 - protein, 9 aa, HUMAN IMMUNODEFICIENCY VIRUS
QRPLVTVKI

SEQ ID NO: 5819 - protein, 9 aa, HUMAN IMMUNODEFICIENCY VIRUS
WKPKMIGGI

SEQ ID NO: 5820 - protein, 9 aa, HUMAN IMMUNODEFICIENCY VIRUS
IKVRQYDQI

SEQ ID NO: 5821 - protein, 9 aa, HUMAN IMMUNODEFICIENCY VIRUS
VRQYDQILI

SEQ ID NO: 5822 - protein, 9 aa, HUMAN IMMUNODEFICIENCY VIRUS
VRQYDQIPI

SEQ ID NO: 5823 - protein, 9 aa, HUMAN IMMUNODEFICIENCY VIRUS
GHKAIGTVL

SEQ ID NO: 5824 - protein, 9 aa, HUMAN IMMUNODEFICIENCY VIRUS
GKKAIGTVL

SEQ ID NO: 5825 - protein, 9 aa, HUMAN IMMUNODEFICIENCY VIRUS
EKIKALTEI

SEQ ID NO: 5826 - protein, 9 aa, HUMAN IMMUNODEFICIENCY VIRUS
EKIKALVEI

SEQ ID NO: 5827 - protein, 9 aa, HUMAN IMMUNODEFICIENCY VIRUS
EKEGKISKI

SEQ ID NO: 5828 - protein, 9 aa, HUMAN IMMUNODEFICIENCY VIRUS
SKIGPENPY

SEQ ID NO: 5829 - protein, 9 aa, HUMAN IMMUNODEFICIENCY VIRUS
SRIGPENPY

SEQ ID NO: 5830 - protein, 9 aa, HUMAN IMMUNODEFICIENCY VIRUS
IKKKDSTKW

SEQ ID NO: 5831 - protein, 9 aa, HUMAN IMMUNODEFICIENCY VIRUS
TKWRKLVDF

SEQ ID NO: 5832 - protein, 9 aa, HUMAN IMMUNODEFICIENCY VIRUS
RKLVDFREL

SEQ ID NO: 5833 - protein, 9 aa, HUMAN IMMUNODEFICIENCY VIRUS
KKKKSVTVL

SEQ ID NO: 5834 - protein, 9 aa, HUMAN IMMUNODEFICIENCY VIRUS
FRKYTAFTI

SEQ ID NO: 5835 - protein, 9 aa, HUMAN IMMUNODEFICIENCY VIRUS
RKQNPDIVI

SEQ ID NO: 5836 - protein, 9 aa, HUMAN IMMUNODEFICIENCY VIRUS
QHRAKIEEL

SEQ ID NO: 5837 - protein, 9 aa, HUMAN IMMUNODEFICIENCY VIRUS
QHRTKIEEL

SEQ ID NO: 5838 - protein, 9 aa, HUMAN IMMUNODEFICIENCY VIRUS
KKHQKEPPF

SEQ ID NO: 5839 - protein, 9 aa, HUMAN IMMUNODEFICIENCY VIRUS
KHQKEPPFL

SEQ ID NO: 5840 - protein, 9 aa, HUMAN IMMUNODEFICIENCY VIRUS
QKEPPFLWM

SEQ ID NO: 5841 - protein, 9 aa, HUMAN IMMUNODEFICIENCY VIRUS
QKLVGKLNW

SEQ ID NO: 5842 - protein, 9 aa, HUMAN IMMUNODEFICIENCY VIRUS
GKLNWASQI

SEQ ID NO: 5843 - protein, 9 aa, HUMAN IMMUNODEFICIENCY VIRUS
IKVKQLCKL

SEQ ID NO: 5844 - protein, 9 aa, HUMAN IMMUNODEFICIENCY VIRUS
IKVRQLCKL

SEQ ID NO: 5845 - protein, 9 aa, HUMAN IMMUNODEFICIENCY VIRUS
LKEPVHGVY

SEQ ID NO: 5846 - protein, 9 aa, HUMAN IMMUNODEFICIENCY VIRUS
FKNLKTGKY

SEQ ID NO: 5847 - protein, 9 aa, HUMAN IMMUNODEFICIENCY VIRUS
YKNLKTGKY

SEQ ID NO: 5848 - protein, 9 aa, HUMAN IMMUNODEFICIENCY VIRUS
LKTGKYAKM

SEQ ID NO: 5849 - protein, 9 aa, HUMAN IMMUNODEFICIENCY VIRUS
LKTGKYARM

SEQ ID NO: 5850 - protein, 9 aa, HUMAN IMMUNODEFICIENCY VIRUS
AHTNDVKQL

SEQ ID NO: 5851 - protein, 9 aa, HUMAN IMMUNODEFICIENCY VIRUS
QKETWEAWW

SEQ ID NO: 5852 - protein, 9 aa, HUMAN IMMUNODEFICIENCY VIRUS
QKETWETWW

SEQ ID NO: 5853 - protein, 9 aa, HUMAN IMMUNODEFICIENCY VIRUS
QKTELQAIY

SEQ ID NO: 5854 - protein, 9 aa, HUMAN IMMUNODEFICIENCY VIRUS
KKEKVYLAW

SEQ ID NO: 5855 - protein, 9 aa, HUMAN IMMUNODEFICIENCY VIRUS
KKEKVYLSW

SEQ ID NO: 5856 - protein, 9 aa, HUMAN IMMUNODEFICIENCY VIRUS
RKVLFLDGI

SEQ ID NO: 5857 - protein, 9 aa, HUMAN IMMUNODEFICIENCY VIRUS
DHEKYHSNW

SEQ ID NO: 5858 - protein, 9 aa, HUMAN IMMUNODEFICIENCY VIRUS
EHEKYHSNW

SEQ ID NO: 5859 - protein, 9 aa, HUMAN IMMUNODEFICIENCY VIRUS
EHERYHSNW

SEQ ID NO: 5860 - protein, 9 aa, HUMAN IMMUNODEFICIENCY VIRUS
THLEGKIIL

SEQ ID NO: 5861 - protein, 9 aa, HUMAN IMMUNODEFICIENCY VIRUS
THLEGKVIL

SEQ ID NO: 5862 - protein, 9 aa, HUMAN IMMUNODEFICIENCY VIRUS
IHTDNGSNF

SEQ ID NO: 5863 - protein, 9 aa, HUMAN IMMUNODEFICIENCY VIRUS
IKQEFGIPY

SEQ ID NO: 5864 - protein, 9 aa, HUMAN IMMUNODEFICIENCY VIRUS
EHLKTAVQM

SEQ ID NO: 5865 - protein, 9 aa, HUMAN IMMUNODEFICIENCY VIRUS
KRKGGIGGY

SEQ ID NO: 5866 - protein, 9 aa, HUMAN IMMUNODEFICIENCY VIRUS
TKELQKQII

SEQ ID NO: 5867 - protein, 9 aa, HUMAN IMMUNODEFICIENCY VIRUS
IKIQNFRVY

SEQ ID NO: 5868 - protein, 9 aa, HUMAN IMMUNODEFICIENCY VIRUS
TKIQNFRVY

SEQ ID NO: 5869 - protein, 9 aa, HUMAN IMMUNODEFICIENCY VIRUS
YRDSRDPIW

SEQ ID NO: 5870 - protein, 9 aa, HUMAN IMMUNODEFICIENCY VIRUS
YRDSRDPLW

SEQ ID NO: 5871 - protein, 9 aa, HUMAN IMMUNODEFICIENCY VIRUS
WKGPAKLLW

SEQ ID NO: 5872 - protein, 9 aa, HUMAN IMMUNODEFICIENCY VIRUS
WKGEGAVVI

SEQ ID NO: 5873 - protein, 9 aa, HUMAN IMMUNODEFICIENCY VIRUS
RKAKIIRDY

SEQ ID NO: 5874 - protein, 10 aa, HUMAN IMMUNODEFICIENCY VIRUS
PKMIGGIGGF

SEQ ID NO: 5875 - protein, 10 aa, HUMAN IMMUNODEFICIENCY VIRUS
IKVRQYDQIL

SEQ ID NO: 5876 - protein, 10 aa, HUMAN IMMUNODEFICIENCY VIRUS
KKDSTKWRKL

SEQ ID NO: 5877 - protein, 10 aa, HUMAN IMMUNODEFICIENCY VIRUS
WRKLVDFREL

SEQ ID NO: 5878 - protein, 10 aa, HUMAN IMMUNODEFICIENCY VIRUS
LKKKKSVTVL

SEQ ID NO: 5879 - protein, 10 aa, HUMAN IMMUNODEFICIENCY VIRUS
DKDFRKYTAF

SEQ ID NO: 5880 - protein, 10 aa, HUMAN IMMUNODEFICIENCY VIRUS
FRKQNPDIVI

SEQ ID NO: 5881 - protein, 10 aa, HUMAN IMMUNODEFICIENCY VIRUS
RKQNPDIVIY

SEQ ID NO: 5882 - protein, 10 aa, HUMAN IMMUNODEFICIENCY VIRUS
AKIEELREHL

SEQ ID NO: 5883 - protein, 10 aa, HUMAN IMMUNODEFICIENCY VIRUS
TKIEELRQHL

SEQ ID NO: 5884 - protein, 10 aa, HUMAN IMMUNODEFICIENCY VIRUS
LREHLLKWGF

SEQ ID NO: 5885 - protein, 10 aa, HUMAN IMMUNODEFICIENCY VIRUS
LRQHLLRWGF

SEQ ID NO: 5886 - protein, 10 aa, HUMAN IMMUNODEFICIENCY VIRUS
DKKHQKEPPF

SEQ ID NO: 5887 - protein, 10 aa, HUMAN IMMUNODEFICIENCY VIRUS
KKHQKEPPFL

SEQ ID NO: 5888 - protein, 10 aa, HUMAN IMMUNODEFICIENCY VIRUS
KHQKEPPFLW

SEQ ID NO: 5889 - protein, 10 aa, HUMAN IMMUNODEFICIENCY VIRUS
DKWTVQPIQL

SEQ ID NO: 5890 - protein, 10 aa, HUMAN IMMUNODEFICIENCY VIRUS
DKWTVQPIVL

SEQ ID NO: 5891 - protein, 10 aa, HUMAN IMMUNODEFICIENCY VIRUS
EKDSWTVNDI

SEQ ID NO: 5892 - protein, 10 aa, HUMAN IMMUNODEFICIENCY VIRUS
GKLNWASQIY

SEQ ID NO: 5893 - protein, 10 aa, HUMAN IMMUNODEFICIENCY VIRUS
IKVKQLCKLL

SEQ ID NO: 5894 - protein, 10 aa, HUMAN IMMUNODEFICIENCY VIRUS
IKVRQLCKLL

SEQ ID NO: 5895 - protein, 10 aa, HUMAN IMMUNODEFICIENCY VIRUS
CKLLRGAKAL

SEQ ID NO: 5896 - protein, 10 aa, HUMAN IMMUNODEFICIENCY VIRUS
CKLLRGTKAL

SEQ ID NO: 5897 - protein, 10 aa, HUMAN IMMUNODEFICIENCY VIRUS
LRGAKALTDI

SEQ ID NO: 5898 - protein, 10 aa, HUMAN IMMUNODEFICIENCY VIRUS
AKALTDIVPL

SEQ ID NO: 5899 - protein, 10 aa, HUMAN IMMUNODEFICIENCY VIRUS
TKALTEVIPL

SEQ ID NO: 5900 - protein, 10 aa, HUMAN IMMUNODEFICIENCY VIRUS
LKEPVHGVYY

SEQ ID NO: 5901 - protein, 10 aa, HUMAN IMMUNODEFICIENCY VIRUS
QKQGQDQWTY

SEQ ID NO: 5902 - protein, 10 aa, HUMAN IMMUNODEFICIENCY VIRUS
QKQGQGQWTY

SEQ ID NO: 5903 - protein, 10 aa, HUMAN IMMUNODEFICIENCY VIRUS
QKIATESIVI

SEQ ID NO: 5904 - protein, 10 aa, HUMAN IMMUNODEFICIENCY VIRUS
GKTPKFKLPI

SEQ ID NO: 5905 - protein, 10 aa, HUMAN IMMUNODEFICIENCY VIRUS
GKTPKFRLPI

SEQ ID NO: 5906 - protein, 10 aa, HUMAN IMMUNODEFICIENCY VIRUS
FKLPIQKETW

SEQ ID NO: 5907 - protein, 10 aa, HUMAN IMMUNODEFICIENCY VIRUS
FRLPIQKETW

SEQ ID NO: 5908 - protein, 10 aa, HUMAN IMMUNODEFICIENCY VIRUS
DRGRQKVVSL

SEQ ID NO: 5909 - protein, 10 aa, HUMAN IMMUNODEFICIENCY VIRUS
QKTELQAIHL

SEQ ID NO: 5910 - protein, 10 aa, HUMAN IMMUNODEFICIENCY VIRUS
QKTELQAIYL

SEQ ID NO: 5911 - protein, 10 aa, HUMAN IMMUNODEFICIENCY VIRUS
IHLALQDSGL

SEQ ID NO: 5912 - protein, 10 aa, HUMAN IMMUNODEFICIENCY VIRUS
IKKEKVYLAW

SEQ ID NO: 5913 - protein, 10 aa, HUMAN IMMUNODEFICIENCY VIRUS
IKKEKVYLSW

SEQ ID NO: 5914 - protein, 10 aa, HUMAN IMMUNODEFICIENCY VIRUS
IRKVLFLDGI

SEQ ID NO: 5915 - protein, 10 aa, HUMAN IMMUNODEFICIENCY VIRUS
DKAQEEHEKY

SEQ ID NO: 5916 - protein, 10 aa, HUMAN IMMUNODEFICIENCY VIRUS
DKAQEEHERY

SEQ ID NO: 5917 - protein, 10 aa, HUMAN IMMUNODEFICIENCY VIRUS
EKYHSNWRAM

SEQ ID NO: 5918 - protein, 10 aa, HUMAN IMMUNODEFICIENCY VIRUS
ERYHSNWRAM

SEQ ID NO: 5919 - protein, 10 aa, HUMAN IMMUNODEFICIENCY VIRUS
WRAMASDFNL

SEQ ID NO: 5920 - protein, 10 aa, HUMAN IMMUNODEFICIENCY VIRUS
DKCQLKGEAM

SEQ ID NO: 5921 - protein, 10 aa, HUMAN IMMUNODEFICIENCY VIRUS
VKAACWWAGI

SEQ ID NO: 5922 - protein, 10 aa, HUMAN IMMUNODEFICIENCY VIRUS
LKTAVQMAVF

SEQ ID NO: 5923 - protein, 10 aa, HUMAN IMMUNODEFICIENCY VIRUS
IHNFKRKGGI

SEQ ID NO: 5924 - protein, 10 aa, HUMAN IMMUNODEFICIENCY VIRUS
FKRKGGIGGY

SEQ ID NO: 5925 - protein, 10 aa, HUMAN IMMUNODEFICIENCY VIRUS
QKQIIKIQNF

SEQ ID NO: 5926 - protein, 10 aa, HUMAN IMMUNODEFICIENCY VIRUS
QKQITKIQNF

SEQ ID NO: 5927 - protein, 10 aa, HUMAN IMMUNODEFICIENCY VIRUS
IKIQNFRVYY

SEQ ID NO: 5928 - protein, 10 aa, HUMAN IMMUNODEFICIENCY VIRUS
TKIQNFRVYY

SEQ ID NO: 5929 - protein, 10 aa, HUMAN IMMUNODEFICIENCY VIRUS
RRKAKIIRDY

SEQ ID NO: 5930 - protein, 11 aa, HUMAN IMMUNODEFICIENCY VIRUS
TRANSPTRREL

SEQ ID NO: 5931 - protein, 11 aa, HUMAN IMMUNODEFICIENCY VIRUS
ERAHSPATREL

SEQ ID NO: 5932 - protein, 11 aa, HUMAN IMMUNODEFICIENCY VIRUS
SRANSPTSRDL

SEQ ID NO: 5933 - protein, 11 aa, HUMAN IMMUNODEFICIENCY VIRUS
TRANSPSSREL

SEQ ID NO: 5934 - protein, 11 aa, HUMAN IMMUNODEFICIENCY VIRUS
TRANSPTTREL

SEQ ID NO: 5935 - protein, 11 aa, HUMAN IMMUNODEFICIENCY VIRUS
IKIGGQLKEAL

SEQ ID NO: 5936 - protein, 11 aa, HUMAN IMMUNODEFICIENCY VIRUS
GKWKPKMIGGI

SEQ ID NO: 5937 - protein, 11 aa, HUMAN IMMUNODEFICIENCY VIRUS
GRWKPKMIGGI

SEQ ID NO: 5938 - protein, 11 aa, HUMAN IMMUNODEFICIENCY VIRUS
PKMIGGIGGFI

SEQ ID NO: 5939 - protein, 11 aa, HUMAN IMMUNODEFICIENCY VIRUS
IKVRQYDQILI

SEQ ID NO: 5940 - protein, 11 aa, HUMAN IMMUNODEFICIENCY VIRUS
IKVRQYDQIPI

SEQ ID NO: 5941 - protein, 11 aa, HUMAN IMMUNODEFICIENCY VIRUS
VRQYDQILIEI

SEQ ID NO: 5942 - protein, 11 aa, HUMAN IMMUNODEFICIENCY VIRUS
VRQYDQIPIEI

SEQ ID NO: 5943 - protein, 11 aa, HUMAN IMMUNODEFICIENCY VIRUS
VKQWPLTEEKI

SEQ ID NO: 5944 - protein, 11 aa, HUMAN IMMUNODEFICIENCY VIRUS
IKALVEICTEM

SEQ ID NO: 5945 - protein, 11 aa, HUMAN IMMUNODEFICIENCY VIRUS
KKKDSTKWRKL

SEQ ID NO: 5946 - protein, 11 aa, HUMAN IMMUNODEFICIENCY VIRUS
FRELNKRTQDF

SEQ ID NO: 5947 - protein, 11 aa, HUMAN IMMUNODEFICIENCY VIRUS
KRTQDFWEVQL

SEQ ID NO: 5948 - protein, 11 aa, HUMAN IMMUNODEFICIENCY VIRUS
RKYTAFTIPSI

SEQ ID NO: 5949 - protein, 11 aa, HUMAN IMMUNODEFICIENCY VIRUS
FRKQNPDIVIY

SEQ ID NO: 5950 - protein, 11 aa, HUMAN IMMUNODEFICIENCY VIRUS
AKIEELREHLL

SEQ ID NO: 5951 - protein, 11 aa, HUMAN IMMUNODEFICIENCY VIRUS
TKIEELRQHLL

SEQ ID NO: 5952 - protein, 11 aa, HUMAN IMMUNODEFICIENCY VIRUS
DKKHQKEPPFL

SEQ ID NO: 5953 - protein, 11 aa, HUMAN IMMUNODEFICIENCY VIRUS
KKHQKEPPFLW

SEQ ID NO: 5954 - protein, 11 aa, HUMAN IMMUNODEFICIENCY VIRUS
KHQKEPPFLWM

SEQ ID NO: 5955 - protein, 11 aa, HUMAN IMMUNODEFICIENCY VIRUS
QKEPPFLWMGY

SEQ ID NO: 5956 - protein, 11 aa, HUMAN IMMUNODEFICIENCY VIRUS
LHPDKWTVQPI

SEQ ID NO: 5957 - protein, 11 aa, HUMAN IMMUNODEFICIENCY VIRUS
LRGTKALTEVI

SEQ ID NO: 5958 - protein, 11 aa, HUMAN IMMUNODEFICIENCY VIRUS
VKQLTEAVQKI

SEQ ID NO: 5959 - protein, 11 aa, HUMAN IMMUNODEFICIENCY VIRUS
QKIATESIVIW

SEQ ID NO: 5960 - protein, 11 aa, HUMAN IMMUNODEFICIENCY VIRUS
EKEPIVGAETF

SEQ ID NO: 5961 - protein, 11 aa, HUMAN IMMUNODEFICIENCY VIRUS
NRETKLGKAGY

SEQ ID NO: 5962 - protein, 11 aa, HUMAN IMMUNODEFICIENCY VIRUS
DKSESELVNQI

SEQ ID NO: 5963 - protein, 11 aa, HUMAN IMMUNODEFICIENCY VIRUS
DKSESELVSQI

SEQ ID NO: 5964 - protein, 11 aa, HUMAN IMMUNODEFICIENCY VIRUS
MHGQVDCSPGI

SEQ ID NO: 5965 - protein, 11 aa, HUMAN IMMUNODEFICIENCY VIRUS
LKTAVQMAVFI

SEQ ID NO: 5966 - protein, 11 aa, HUMAN IMMUNODEFICIENCY VIRUS
ERIIDIIASDI

SEQ ID NO: 5967 - protein, 11 aa, HUMAN IMMUNODEFICIENCY VIRUS
ERIIDIIATDI

SEQ ID NO: 5968 - protein, 11 aa, HUMAN IMMUNODEFICIENCY VIRUS
ERIVDIIATDI

SEQ ID NO: 5969 - protein, 11 aa, HUMAN IMMUNODEFICIENCY VIRUS
TKELQKQIIKI

SEQ ID NO: 5970 - protein, 11 aa, HUMAN IMMUNODEFICIENCY VIRUS
TKELQKQITKI

SEQ ID NO: 5971 - protein, 11 aa, HUMAN IMMUNODEFICIENCY VIRUS
IKVVPRRKAKI

SEQ ID NO: 5972 - protein, 11 aa, HUMAN IMMUNODEFICIENCY VIRUS
IKVVPRRKVKI

SEQ ID NO: 5973 - protein, 11 aa, HUMAN IMMUNODEFICIENCY VIRUS
PRRKAKIIRDY

SEQ ID NO: 5974 - protein, 11 aa, HUMAN IMMUNODEFICIENCY VIRUS
AKIIRDYGKQM

SEQ ID NO: 5975 - protein, 8 aa, HUMAN IMMUNODEFICIENCY VIRUS
VRIIKILY

SEQ ID NO: 5976 - protein, 8 aa, HUMAN IMMUNODEFICIENCY VIRUS
RKNRRRRW

SEQ ID NO: 5977 - protein, 8 aa, HUMAN IMMUNODEFICIENCY VIRUS
RRNRRRRW

SEQ ID NO: 5978 - protein, 8 aa, HUMAN IMMUNODEFICIENCY VIRUS
WRARQRQI

SEQ ID NO: 5979 - protein, 8 aa, HUMAN IMMUNODEFICIENCY VIRUS
WRERQRQI

SEQ ID NO: 5980 - protein, 8 aa, HUMAN IMMUNODEFICIENCY VIRUS
ERILSTCL

SEQ ID NO: 5981 - protein, 9 aa, HUMAN IMMUNODEFICIENCY VIRUS
ARKNRRRRW

SEQ ID NO: 5982 - protein, 9 aa, HUMAN IMMUNODEFICIENCY VIRUS
ARRNRRRRW

SEQ ID NO: 5983 - protein, 9 aa, HUMAN IMMUNODEFICIENCY VIRUS
ARQRQIHSI

SEQ ID NO: 5984 - protein, 9 aa, HUMAN IMMUNODEFICIENCY VIRUS
GRPAEPVPL

SEQ ID NO: 5985 - protein, 9 aa, HUMAN IMMUNODEFICIENCY VIRUS
GRSAEPVPL

SEQ ID NO: 5986 - protein, 10 aa, HUMAN IMMUNODEFICIENCY VIRUS
GRSGDSDEEL

SEQ ID NO: 5987 - protein, 10 aa, HUMAN IMMUNODEFICIENCY VIRUS
IKILYQSNPY

SEQ ID NO: 5988 - protein, 10 aa, HUMAN IMMUNODEFICIENCY VIRUS
RRWRARQRQI

SEQ ID NO: 5989 - protein, 10 aa, HUMAN IMMUNODEFICIENCY VIRUS
RRWRERQRQI

SEQ ID NO: 5990 - protein, 11 aa, HUMAN IMMUNODEFICIENCY VIRUS
GRSGDSDEELL

SEQ ID NO: 5991 - protein, 11 aa, HUMAN IMMUNODEFICIENCY VIRUS
RRRWRARQRQI

SEQ ID NO: 5992 - protein, 11 aa, HUMAN IMMUNODEFICIENCY VIRUS
RRRWRERQRQI

SEQ ID NO: 5993 - protein, 11 aa, HUMAN IMMUNODEFICIENCY VIRUS
WRARQRQIHSI

SEQ ID NO: 5994 - protein, 11 aa, HUMAN IMMUNODEFICIENCY VIRUS
GRPAEPVPLQL

SEQ ID NO: 5995 - protein, 11 aa, HUMAN IMMUNODEFICIENCY VIRUS
GRSAEPVPLQL

SEQ ID NO: 5996 - protein, 8 aa, HUMAN IMMUNODEFICIENCY VIRUS
KKGLGISY

SEQ ID NO: 5997 - protein, 8 aa, HUMAN IMMUNODEFICIENCY VIRUS
NKGLGISY

SEQ ID NO: 5998 - protein, 8 aa, HUMAN IMMUNODEFICIENCY VIRUS
TKGLGISY

SEQ ID NO: 5999 - protein, 8 aa, HUMAN IMMUNODEFICIENCY VIRUS
DRMKIRTW

SEQ ID NO: 6000 - protein, 8 aa, HUMAN IMMUNODEFICIENCY VIRUS
DRMRINTW

SEQ ID NO: 6001 - protein, 8 aa, HUMAN IMMUNODEFICIENCY VIRUS
DRMRIRTW

SEQ ID NO: 6002 - protein, 8 aa, HUMAN IMMUNODEFICIENCY VIRUS
ARLVITTY

SEQ ID NO: 6003 - protein, 8 aa, HUMAN IMMUNODEFICIENCY VIRUS
LHTGERDW

SEQ ID NO: 6004 - protein, 8 aa, HUMAN IMMUNODEFICIENCY VIRUS
GHGVSIEW

SEQ ID NO: 6005 - protein, 8 aa, HUMAN IMMUNODEFICIENCY VIRUS
GHNKVGSL

SEQ ID NO: 6006 - protein, 8 aa, HUMAN IMMUNODEFICIENCY VIRUS
NKVGSLQY

SEQ ID NO: 6007 - protein, 8 aa, HUMAN IMMUNODEFICIENCY VIRUS
PKKIKPPL

SEQ ID NO: 6008 - protein, 8 aa, HUMAN IMMUNODEFICIENCY VIRUS
KKLTEDRW

SEQ ID NO: 6009 - protein, 8 aa, HUMAN IMMUNODEFICIENCY VIRUS
GHRGSHTM

SEQ ID NO: 6010 - protein, 9 aa, HUMAN IMMUNODEFICIENCY VIRUS
NRWQVLIVW

SEQ ID NO: 6011 - protein, 9 aa, HUMAN IMMUNODEFICIENCY VIRUS
NRWQVMIVW

SEQ ID NO: 6012 - protein, 9 aa, HUMAN IMMUNODEFICIENCY VIRUS
MKIRTWNSL

SEQ ID NO: 6013 - protein, 9 aa, HUMAN IMMUNODEFICIENCY VIRUS
MRIRTWKSL

SEQ ID NO: 6014 - protein, 9 aa, HUMAN IMMUNODEFICIENCY VIRUS
MRIRTWNSL

SEQ ID NO: 6015 - protein, 9 aa, HUMAN IMMUNODEFICIENCY VIRUS
WKSLVKHHM

SEQ ID NO: 6016 - protein, 9 aa, HUMAN IMMUNODEFICIENCY VIRUS
WKSLVKYHM

SEQ ID NO: 6017 - protein, 9 aa, HUMAN IMMUNODEFICIENCY VIRUS
PKISSEVHI

SEQ ID NO: 6018 - protein, 9 aa, HUMAN IMMUNODEFICIENCY VIRUS
PKVSSEVHI

SEQ ID NO: 6019 - protein, 9 aa, HUMAN IMMUNODEFICIENCY VIRUS
PRISSEVHI

SEQ ID NO: 6020 - protein, 9 aa, HUMAN IMMUNODEFICIENCY VIRUS
ARLVITTYW

SEQ ID NO: 6021 - protein, 9 aa, HUMAN IMMUNODEFICIENCY VIRUS
WHLGHGVSI

SEQ ID NO: 6022 - protein, 9 aa, HUMAN IMMUNODEFICIENCY VIRUS
WHLGQGVSI

SEQ ID NO: 6023 - protein, 9 aa, HUMAN IMMUNODEFICIENCY VIRUS
IHLYYFDCF

SEQ ID NO: 6024 - protein, 9 aa, HUMAN IMMUNODEFICIENCY VIRUS
IHMHYFDCF

SEQ ID NO: 6025 - protein, 9 aa, HUMAN IMMUNODEFICIENCY VIRUS
NKVGSLQYL

SEQ ID NO: 6026 - protein, 9 aa, HUMAN IMMUNODEFICIENCY VIRUS
VKKLTEDRW

SEQ ID NO: 6027 - protein, 10 aa, HUMAN IMMUNODEFICIENCY VIRUS
WKSLVKHHMY

SEQ ID NO: 6028 - protein, 10 aa, HUMAN IMMUNODEFICIENCY VIRUS
AKGWFYRHHY

SEQ ID NO: 6029 - protein, 10 aa, HUMAN IMMUNODEFICIENCY VIRUS
VHIPLGDARL

SEQ ID NO: 6030 - protein, 10 aa, HUMAN IMMUNODEFICIENCY VIRUS
VHIPLGEARL

SEQ ID NO: 6031 - protein, 10 aa, HUMAN IMMUNODEFICIENCY VIRUS
LHTGERDWHL

SEQ ID NO: 6032 - protein, 10 aa, HUMAN IMMUNODEFICIENCY VIRUS
GHGVSIEWRL

SEQ ID NO: 6033 - protein, 10 aa, HUMAN IMMUNODEFICIENCY VIRUS
GHNKVGSLQY

SEQ ID NO: 6034 - protein, 10 aa, HUMAN IMMUNODEFICIENCY VIRUS
IKPKKIKPPL

SEQ ID NO: 6035 - protein, 10 aa, HUMAN IMMUNODEFICIENCY VIRUS
TKGHRGSHTM

SEQ ID NO: 6036 - protein, 11 aa, HUMAN IMMUNODEFICIENCY VIRUS
DRMKIRTWNSL

SEQ ID NO: 6037 - protein, 11 aa, HUMAN IMMUNODEFICIENCY VIRUS
DRMRIRTWKSL

SEQ ID NO: 6038 - protein, 11 aa, HUMAN IMMUNODEFICIENCY VIRUS
DRMRIRTWNSL

SEQ ID NO: 6039 - protein, 11 aa, HUMAN IMMUNODEFICIENCY VIRUS
WKSLVKHHMYI

SEQ ID NO: 6040 - protein, 11 aa, HUMAN IMMUNODEFICIENCY VIRUS
RHPKVSSEVHI

SEQ ID NO: 6041 - protein, 11 aa, HUMAN IMMUNODEFICIENCY VIRUS
PKISSEVHIPL

SEQ ID NO: 6042 - protein, 11 aa, HUMAN IMMUNODEFICIENCY VIRUS
PKVSSEVHIPL

SEQ ID NO: 6043 - protein, 11 aa, HUMAN IMMUNODEFICIENCY VIRUS
PRISSEVHIPL

SEQ ID NO: 6044 - protein, 11 aa, HUMAN IMMUNODEFICIENCY VIRUS
ARLVITTYWGL

SEQ ID NO: 6045 - protein, 11 aa, HUMAN IMMUNODEFICIENCY VIRUS
WHLGHGVSIEW

SEQ ID NO: 6046 - protein, 11 aa, HUMAN IMMUNODEFICIENCY VIRUS
WHLGQGVSIEW

SEQ ID NO: 6047 - protein, 11 aa, HUMAN IMMUNODEFICIENCY VIRUS
GHNKVGSLQYL

SEQ ID NO: 6048 - protein, 11 aa, HUMAN IMMUNODEFICIENCY VIRUS
NKVGSLQYLAL

SEQ ID NO: 6049 - protein, 8 aa, HUMAN IMMUNODEFICIENCY VIRUS
QREPYNEW

SEQ ID NO: 6050 - protein, 8 aa, HUMAN IMMUNODEFICIENCY VIRUS
VRHFPRIW

SEQ ID NO: 6051 - protein, 8 aa, HUMAN IMMUNODEFICIENCY VIRUS
VRHFPRPW

SEQ ID NO: 6052 - protein, 8 aa, HUMAN IMMUNODEFICIENCY VIRUS
RHFPRIWL

SEQ ID NO: 6053 - protein, 8 aa, HUMAN IMMUNODEFICIENCY VIRUS
RHFPRPWL

SEQ ID NO: 6054 - protein, 8 aa, HUMAN IMMUNODEFICIENCY VIRUS
PRIWLHSL

SEQ ID NO: 6055 - protein, 8 aa, HUMAN IMMUNODEFICIENCY VIRUS
PRPWLHGL

SEQ ID NO: 6056 - protein, 8 aa, HUMAN IMMUNODEFICIENCY VIRUS
LHGLGQHI

SEQ ID NO: 6057 - protein, 8 aa, HUMAN IMMUNODEFICIENCY VIRUS
IRILQQLL

SEQ ID NO: 6058 - protein, 8 aa, HUMAN IMMUNODEFICIENCY VIRUS
CRHSRIGI

SEQ ID NO: 6059 - protein, 8 aa, HUMAN IMMUNODEFICIENCY VIRUS
QHSRIGII

SEQ ID NO: 6060 - protein, 9 aa, HUMAN IMMUNODEFICIENCY VIRUS
LKNEAVRHF

SEQ ID NO: 6061 - protein, 9 aa, HUMAN IMMUNODEFICIENCY VIRUS
LKQEAVRHF

SEQ ID NO: 6062 - protein, 9 aa, HUMAN IMMUNODEFICIENCY VIRUS
LKSEAVRHF

SEQ ID NO: 6063 - protein, 9 aa, HUMAN IMMUNODEFICIENCY VIRUS
VRHFPRIWL

SEQ ID NO: 6064 - protein, 9 aa, HUMAN IMMUNODEFICIENCY VIRUS
VRHFPRPWL

SEQ ID NO: 6065 - protein, 9 aa, HUMAN IMMUNODEFICIENCY VIRUS
LHGLGQHIY

SEQ ID NO: 6066 - protein, 9 aa, HUMAN IMMUNODEFICIENCY VIRUS
IRILQQLLF

SEQ ID NO: 6067 - protein, 10 aa, HUMAN IMMUNODEFICIENCY VIRUS
QREPYNEWTL

SEQ ID NO: 6068 - protein, 10 aa, HUMAN IMMUNODEFICIENCY VIRUS
IRILQQLLFI

SEQ ID NO: 6069 - protein, 10 aa, HUMAN IMMUNODEFICIENCY VIRUS
FRIGCQHSRI

SEQ ID NO: 6070 - protein, 10 aa, HUMAN IMMUNODEFICIENCY VIRUS
FRIGCRHSRI

SEQ ID NO: 6071 - protein, 11 aa, HUMAN IMMUNODEFICIENCY VIRUS
RHFPRIWLHSL

SEQ ID NO: 6072 - protein, 11 aa, HUMAN IMMUNODEFICIENCY VIRUS
RHFPRPWLHGL

SEQ ID NO: 6073 - protein, 11 aa, HUMAN IMMUNODEFICIENCY VIRUS
PRPWLHGLGQY

SEQ ID NO: 6074 - protein, 11 aa, HUMAN IMMUNODEFICIENCY VIRUS
QHIYETYGDTW

SEQ ID NO: 6075 - protein, 11 aa, HUMAN IMMUNODEFICIENCY VIRUS
QHIYNTYGDTW

SEQ ID NO: 6076 - protein, 8 aa, HUMAN IMMUNODEFICIENCY VIRUS
QRKIDRLI

SEQ ID NO: 6077 - protein, 9 aa, HUMAN IMMUNODEFICIENCY VIRUS
AKVDYRIVI

SEQ ID NO: 6078 - protein, 9 aa, HUMAN IMMUNODEFICIENCY VIRUS
RKILRQRKI

SEQ ID NO: 6079 - protein, 9 aa, HUMAN IMMUNODEFICIENCY VIRUS
LRQRKIDRL

SEQ ID NO: 6080 - protein, 10 aa, HUMAN IMMUNODEFICIENCY VIRUS
YRKILRQRKI

SEQ ID NO: 6081 - protein, 9 aa, HUMAN IMMUNODEFICIENCY VIRUS
KKLLKQKKI

SEQ ID NO: 6082 - protein, 10 aa, HUMAN IMMUNODEFICIENCY VIRUS
LRQRKIDRLI

SEQ ID NO: 6083 - protein, 10 aa, HUMAN IMMUNODEFICIENCY VIRUS
RKIDRLIDRI

SEQ ID NO: 6084 - protein, 11 aa, HUMAN IMMUNODEFICIENCY VIRUS
QRKIDRLIDRI

SEQ ID NO: 6085 - protein, 8 aa, HUMAN IMMUNODEFICIENCY VIRUS
NTSPRSRV

SEQ ID NO: 6086 - protein, 10 aa, HUMAN IMMUNODEFICIENCY VIRUS
NTSPRSRVAY

SEQ ID NO: 6087 - protein, 10 aa, HUMAN IMMUNODEFICIENCY VIRUS
TAGNSSRAAY

SEQ ID NO: 6088 - protein, 11 aa, HUMAN IMMUNODEFICIENCY VIRUS
TSNSSNSSTPI

SEQ ID NO: 6089 - protein, 11 aa, HUMAN IMMUNODEFICIENCY VIRUS
GTAGNSSRAAY

SEQ ID NO: 6090 - protein, 8 aa, HUMAN IMMUNODEFICIENCY VIRUS
HTEGNITL

SEQ ID NO: 6091 - protein, 10 aa, HUMAN IMMUNODEFICIENCY VIRUS
NANITIPCRI

SEQ ID NO: 6092 - protein, 11 aa, HUMAN IMMUNODEFICIENCY VIRUS
STRTHREKRAV

SEQ ID NO: 6093 - protein, 9 aa, HUMAN IMMUNODEFICIENCY VIRUS
DSSNSTGNY

SEQ ID NO: 6094 - protein, 8 aa, HUMAN IMMUNODEFICIENCY VIRUS
STNGTETF

SEQ ID NO: 6095 - protein, 10 aa, HUMAN IMMUNODEFICIENCY VIRUS
NTETNKTETF

SEQ ID NO: 6096 - protein, 10 aa, HUMAN IMMUNODEFICIENCY VIRUS
NTTGNTTETF

SEQ ID NO: 6097 - protein, 9 aa, HUMAN IMMUNODEFICIENCY VIRUS
GSENGTETF

SEQ ID NO: 6098 - protein, 8 aa, HUMAN IMMUNODEFICIENCY VIRUS
NTRKSIRI

SEQ ID NO: 6099 - protein, 8 aa, HUMAN IMMUNODEFICIENCY VIRUS
SSLKGLRL

SEQ ID NO: 6100 - protein, 10 aa, HUMAN IMMUNODEFICIENCY VIRUS
SSLKGLRLGW

SEQ ID NO: 6101 - protein, 8 aa, HUMAN IMMUNODEFICIENCY VIRUS
CTPAGFAI

SEQ ID NO: 6102 - protein, 9 aa, HUMAN IMMUNODEFICIENCY VIRUS
QSSGGDPEI

SEQ ID NO: 6103 - protein, 10 aa, HUMAN IMMUNODEFICIENCY VIRUS
QSSGGDPEIV

SEQ ID NO: 6104 - protein, 10 aa, HUMAN IMMUNODEFICIENCY VIRUS
WSQELKNSAV

SEQ ID NO: 6105 - protein, 11 aa, HUMAN IMMUNODEFICIENCY VIRUS
FAILKCNDKKF

SEQ ID NO: 6106 - protein, 9 aa, HUMAN IMMUNODEFICIENCY VIRUS
RAVGIGAVF

SEQ ID NO: 6107 - protein, 10 aa, HUMAN IMMUNODEFICIENCY VIRUS
RAVGIGAVFL

SEQ ID NO: 6108 - protein, 8 aa, HUMAN IMMUNODEFICIENCY VIRUS
AARTVELL

SEQ ID NO: 6109 - protein, 8 aa, HUMAN IMMUNODEFICIENCY VIRUS
GTDRVIEV

SEQ ID NO: 6110 - protein, 9 aa, HUMAN IMMUNODEFICIENCY VIRUS
LALDKWASL

SEQ ID NO: 6111 - protein, 9 aa, HUMAN IMMUNODEFICIENCY VIRUS
IAARTVELL

SEQ ID NO: 6112 - protein, 9 aa, HUMAN IMMUNODEFICIENCY VIRUS
VSLLNATAI

SEQ ID NO: 6113 - protein, 10 aa, HUMAN IMMUNODEFICIENCY VIRUS
YATGDIIGDI

SEQ ID NO: 6114 - protein, 10 aa, HUMAN IMMUNODEFICIENCY VIRUS
TTNVPWNSSW

SEQ ID NO: 6115 - protein, 10 aa, HUMAN IMMUNODEFICIENCY VIRUS
LALDKWASLW

SEQ ID NO: 6116 - protein, 10 aa, HUMAN IMMUNODEFICIENCY VIRUS
ISNWLWYIKI

SEQ ID NO: 6117 - protein, 10 aa, HUMAN IMMUNODEFICIENCY VIRUS
RSIRLVNGFL

SEQ ID NO: 6118 - protein, 11 aa, HUMAN IMMUNODEFICIENCY VIRUS
CTTNVPWNSSW

SEQ ID NO: 6119 - protein, 11 aa, HUMAN IMMUNODEFICIENCY VIRUS
ISNWLWYIKIF

SEQ ID NO: 6120 - protein, 11 aa, HUMAN IMMUNODEFICIENCY VIRUS
SAVSLLNATAI

SEQ ID NO: 6121 - protein, 11 aa, HUMAN IMMUNODEFICIENCY VIRUS
VSLLNATAIAV

SEQ ID NO: 6122 - protein, 8 aa, HUMAN IMMUNODEFICIENCY VIRUS
RAVGIGAV

SEQ ID NO: 6123 - protein, 9 aa, HUMAN IMMUNODEFICIENCY VIRUS
EAQQHLLKL

SEQ ID NO: 6124 - protein, 11 aa, HUMAN IMMUNODEFICIENCY VIRUS
EAQQHLLKLTV

SEQ ID NO: 6125 - protein, 8 aa, HUMAN IMMUNODEFICIENCY VIRUS
RAMYAPPI

SEQ ID NO: 6126 - protein, 8 aa, HUMAN IMMUNODEFICIENCY VIRUS
GALFLGFL

SEQ ID NO: 6127 - protein, 8 aa, HUMAN IMMUNODEFICIENCY VIRUS
IAARTVEL

SEQ ID NO: 6128 - protein, 8 aa, HUMAN IMMUNODEFICIENCY VIRUS
PTRIRQGL

SEQ ID NO: 6129 - protein, 9 aa, HUMAN IMMUNODEFICIENCY VIRUS
ATGDIIGDI

SEQ ID NO: 6130 - protein, 9 aa, HUMAN IMMUNODEFICIENCY VIRUS
RSIRLVNGF

SEQ ID NO: 6131 - protein, 10 aa, HUMAN IMMUNODEFICIENCY VIRUS
MTWMEWEREI

SEQ ID NO: 6132 - protein, 10 aa, HUMAN IMMUNODEFICIENCY VIRUS
RAILHIPRRI

SEQ ID NO: 6133 - protein, 11 aa, HUMAN IMMUNODEFICIENCY VIRUS
PTDPNPQEVVL

SEQ ID NO: 6134 - protein, 11 aa, HUMAN IMMUNODEFICIENCY VIRUS
TSVITQACPKV

SEQ ID NO: 6135 - protein, 11 aa, HUMAN IMMUNODEFICIENCY VIRUS
GTGPCKNVSTV

SEQ ID NO: 6136 - protein, 11 aa, HUMAN IMMUNODEFICIENCY VIRUS
TTHSFNCRGEF

SEQ ID NO: 6137 - protein, 11 aa, HUMAN IMMUNODEFICIENCY VIRUS
CSGKLICTTTV

SEQ ID NO: 6138 - protein, 11 aa, HUMAN IMMUNODEFICIENCY VIRUS
ITKWLWYIKIF

SEQ ID NO: 6139 - protein, 11 aa, HUMAN IMMUNODEFICIENCY VIRUS
FSYHRLRDLLL

SEQ ID NO: 6140 - protein, 8 aa, HUMAN IMMUNODEFICIENCY VIRUS
LAEEEVVI

SEQ ID NO: 6141 - protein, 8 aa, HUMAN IMMUNODEFICIENCY VIRUS
GAMFLGFL

SEQ ID NO: 6142 - protein, 9 aa, HUMAN IMMUNODEFICIENCY VIRUS
RSIRLVSGF

SEQ ID NO: 6143 - protein, 10 aa, HUMAN IMMUNODEFICIENCY VIRUS
PTDPNPQEVV

SEQ ID NO: 6144 - protein, 10 aa, HUMAN IMMUNODEFICIENCY VIRUS
SAITQACPKV

SEQ ID NO: 6145 - protein, 10 aa, HUMAN IMMUNODEFICIENCY VIRUS
GSLAEEEVVI

SEQ ID NO: 6146 - protein, 10 aa, HUMAN IMMUNODEFICIENCY VIRUS
SSGGDPEIVM

SEQ ID NO: 6147 - protein, 10 aa, HUMAN IMMUNODEFICIENCY VIRUS
RSIRLVSGFL

SEQ ID NO: 6148 - protein, 10 aa, HUMAN IMMUNODEFICIENCY VIRUS
FSYHRLRDFI

SEQ ID NO: 6149 - protein, 11 aa, HUMAN IMMUNODEFICIENCY VIRUS
TSAITQACPKV

SEQ ID NO: 6150 - protein, 11 aa, HUMAN IMMUNODEFICIENCY VIRUS
FSYHRLRDFIL

SEQ ID NO: 6151 - protein, 9 aa, HUMAN IMMUNODEFICIENCY VIRUS
NAKTIIVQL

SEQ ID NO: 6152 - protein, 8 aa, HUMAN IMMUNODEFICIENCY VIRUS
QAMYAPPI

SEQ ID NO: 6153 - protein, 8 aa, HUMAN IMMUNODEFICIENCY VIRUS
ISNWLWYI

SEQ ID NO: 6154 - protein, 9 aa, HUMAN IMMUNODEFICIENCY VIRUS
GSLAEEEVV

SEQ ID NO: 6155 - protein, 10 aa, HUMAN IMMUNODEFICIENCY VIRUS
ITNWLWYIKI

SEQ ID NO: 6156 - protein, 10 aa, HUMAN IMMUNODEFICIENCY VIRUS
FSYHRLRDLL

SEQ ID NO: 6157 - protein, 10 aa, HUMAN IMMUNODEFICIENCY VIRUS
IAVAEGTDRV

SEQ ID NO: 6158 - protein, 11 aa, HUMAN IMMUNODEFICIENCY VIRUS
ITNWLWYIKIF

SEQ ID NO: 6159 - protein, 11 aa, HUMAN IMMUNODEFICIENCY VIRUS
IAVAEGTDRVI

SEQ ID NO: 6160 - protein, 10 aa, HUMAN IMMUNODEFICIENCY VIRUS
ITKWLWYIKI

SEQ ID NO: 6161 - protein, 11 aa, HUMAN IMMUNODEFICIENCY VIRUS
ITLPCRIKQII

SEQ ID NO: 6162 - protein, 11 aa, HUMAN IMMUNODEFICIENCY VIRUS
IAVAEGTDRII

SEQ ID NO: 6163 - protein, 8 aa, HUMAN IMMUNODEFICIENCY VIRUS
GSLAEEEV

SEQ ID NO: 6164 - protein, 8 aa, HUMAN IMMUNODEFICIENCY VIRUS
SSGGDLEI

SEQ ID NO: 6165 - protein, 8 aa, HUMAN IMMUNODEFICIENCY VIRUS
ITKWLWYI

SEQ ID NO: 6166 - protein, 8 aa, HUMAN IMMUNODEFICIENCY VIRUS
VAEGTDRV

SEQ ID NO: 6167 - protein, 9 aa, HUMAN IMMUNODEFICIENCY VIRUS
HSFNCRGEF

SEQ ID NO: 6168 - protein, 9 aa, HUMAN IMMUNODEFICIENCY VIRUS
VSGFLALAW

SEQ ID NO: 6169 - protein, 9 aa, HUMAN IMMUNODEFICIENCY VIRUS
VAEGTDRVI

SEQ ID NO: 6170 - protein, 10 aa, HUMAN IMMUNODEFICIENCY VIRUS
HSFNCRGEFF

SEQ ID NO: 6171 - protein, 10 aa, HUMAN IMMUNODEFICIENCY VIRUS
IAVAEGTDRI

SEQ ID NO: 6172 - protein, 11 aa, HUMAN IMMUNODEFICIENCY VIRUS
TTHSFNCGGEF

SEQ ID NO: 6173 - protein, 11 aa, HUMAN IMMUNODEFICIENCY VIRUS
HSFNCRGEFFY

SEQ ID NO: 6174 - protein, 8 aa, HUMAN IMMUNODEFICIENCY VIRUS
GTGPCKNV

SEQ ID NO: 6175 - protein, 9 aa, HUMAN IMMUNODEFICIENCY VIRUS
DAKAYDTEV

SEQ ID NO: 6176 - protein, 9 aa, HUMAN IMMUNODEFICIENCY VIRUS
ASLWNWFDI

SEQ ID NO: 6177 - protein, 10 aa, HUMAN IMMUNODEFICIENCY VIRUS
KAYDTEVHNV

SEQ ID NO: 6178 - protein, 10 aa, HUMAN IMMUNODEFICIENCY VIRUS
VAPTKAKRRV

SEQ ID NO: 6179 - protein, 10 aa, HUMAN IMMUNODEFICIENCY VIRUS
WASLWNWFDI

SEQ ID NO: 6180 - protein, 11 aa, HUMAN IMMUNODEFICIENCY VIRUS
ASDAKAYDTEV

SEQ ID NO: 6181 - protein, 11 aa, HUMAN IMMUNODEFICIENCY VIRUS
KAYDTEVHNVW

SEQ ID NO: 6182 - protein, 11 aa, HUMAN IMMUNODEFICIENCY VIRUS
VAPTKAKRRVV

SEQ ID NO: 6183 - protein, 11 aa, HUMAN IMMUNODEFICIENCY VIRUS
CSGKLICTTNV

SEQ ID NO: 6184 - protein, 9 aa, HUMAN IMMUNODEFICIENCY VIRUS
SSGGDPEIV

SEQ ID NO: 6185 - protein, 9 aa, HUMAN IMMUNODEFICIENCY VIRUS
FSYHRLRDF

SEQ ID NO: 6186 - protein, 9 aa, HUMAN IMMUNODEFICIENCY VIRUS
VAEGTDRII

SEQ ID NO: 6187 - protein, 8 aa, HUMAN IMMUNODEFICIENCY VIRUS
DTEVHNVW

SEQ ID NO: 6188 - protein, 8 aa, HUMAN IMMUNODEFICIENCY VIRUS
SSNITGLL

SEQ ID NO: 6189 - protein, 8 aa, HUMAN IMMUNODEFICIENCY VIRUS
ITNWLWYI

SEQ ID NO: 6190 - protein, 8 aa, HUMAN IMMUNODEFICIENCY VIRUS
VAEGTDRI

SEQ ID NO: 6191 - protein, 9 aa, HUMAN IMMUNODEFICIENCY VIRUS
CSSNITGLL

SEQ ID NO: 6192 - protein, 9 aa, HUMAN IMMUNODEFICIENCY VIRUS
SSNITGLLL

SEQ ID NO: 6193 - protein, 10 aa, HUMAN IMMUNODEFICIENCY VIRUS
CSSNITGLLL

SEQ ID NO: 6194 - protein, 11 aa, HUMAN IMMUNODEFICIENCY VIRUS
CSGKLICTTAV

SEQ ID NO: 6195 - protein, 11 aa, HUMAN IMMUNODEFICIENCY VIRUS
LALAWDDLRSL

SEQ ID NO: 6196 - protein, 9 aa, HUMAN IMMUNODEFICIENCY VIRUS
LAWDDLRSL

SEQ ID NO: 6197 - protein, 11 aa, HUMAN IMMUNODEFICIENCY VIRUS
LAWDDLRSLCL

SEQ ID NO: 6198 - protein, 8 aa, HUMAN IMMUNODEFICIENCY VIRUS
CSSNITGL

SEQ ID NO: 6199 - protein, 9 aa, HUMAN IMMUNODEFICIENCY VIRUS
PTDPNPQEV

SEQ ID NO: 6200 - protein, 10 aa, HUMAN IMMUNODEFICIENCY VIRUS
ETFRPGGGDM

SEQ ID NO: 6201 - protein, 8 aa, HUMAN IMMUNODEFICIENCY VIRUS
PTKAKRRV

SEQ ID NO: 6202 - protein, 8 aa, HUMAN IMMUNODEFICIENCY VIRUS
GAVFLGFL

SEQ ID NO: 6203 - protein, 9 aa, HUMAN IMMUNODEFICIENCY VIRUS
PTKAKRRVV

SEQ ID NO: 6204 - protein, 8 aa, HUMAN IMMUNODEFICIENCY VIRUS
KAMYAPPI

SEQ ID NO: 6205 - protein, 9 aa, HUMAN IMMUNODEFICIENCY VIRUS
FSYHRLRDL

SEQ ID NO: 6206 - protein, 8 aa, HUMAN IMMUNODEFICIENCY VIRUS
SSGGDPEI

SEQ ID NO: 6207 - protein, 8 aa, HUMAN IMMUNODEFICIENCY VIRUS
LALAWDDL

SEQ ID NO: 6208 - protein, 9 aa, HUMAN IMMUNODEFICIENCY VIRUS
PTDPNPQEI

SEQ ID NO: 6209 - protein, 10 aa, HUMAN IMMUNODEFICIENCY VIRUS
ITLPCRIKQI

SEQ ID NO: 6210 - protein, 11 aa, HUMAN IMMUNODEFICIENCY VIRUS
LSGIVQQQNNL

SEQ ID NO: 6211 - protein, 8 aa, HUMAN IMMUNODEFICIENCY VIRUS
CTHGIRPV

SEQ ID NO: 6212 - protein, 8 aa, HUMAN IMMUNODEFICIENCY VIRUS
QSNLLRAI

SEQ ID NO: 6213 - protein, 9 aa, HUMAN IMMUNODEFICIENCY VIRUS
CTHGIRPVV

SEQ ID NO: 6214 - protein, 10 aa, HUMAN IMMUNODEFICIENCY VIRUS
ITLTVQARQL

SEQ ID NO: 6215 - protein, 11 aa, HUMAN IMMUNODEFICIENCY VIRUS
ITLTVQARQLL

SEQ ID NO: 6216 - protein, 10 aa, HUMAN IMMUNODEFICIENCY VIRUS
VSFEPIPIHY

SEQ ID NO: 6217 - protein, 9 aa, HUMAN IMMUNODEFICIENCY VIRUS
YSPLSFQTL

SEQ ID NO: 6218 - protein, 8 aa, HUMAN IMMUNODEFICIENCY VIRUS
CAPAGFAI

SEQ ID NO: 6219 - protein, 9 aa, HUMAN IMMUNODEFICIENCY VIRUS
CAPAGFAIL

SEQ ID NO: 6220 - protein, 10 aa, HUMAN IMMUNODEFICIENCY VIRUS
ITQACPKVSF

SEQ ID NO: 6221 - protein, 8 aa, HUMAN IMMUNODEFICIENCY VIRUS
VSFEPIPI

SEQ ID NO: 6222 - protein, 8 aa, HUMAN IMMUNODEFICIENCY VIRUS
WASLWNWF

SEQ ID NO: 6223 - protein, 11 aa, HUMAN IMMUNODEFICIENCY VIRUS
QACPKVSFEPI

SEQ ID NO: 6224 - protein, 10 aa, HUMAN IMMUNODEFICIENCY VIRUS
FAVLSIVNRV

SEQ ID NO: 6225 - protein, 11 aa, HUMAN IMMUNODEFICIENCY VIRUS
RSLCLFSYHRL

SEQ ID NO: 6226 - protein, 9 aa, HUMAN IMMUNODEFICIENCY VIRUS
CTHGIKPVV

SEQ ID NO: 6227 - protein, 11 aa, HUMAN IMMUNODEFICIENCY VIRUS
LSGIVQQQSNL

SEQ ID NO: 6228 - protein, 8 aa, HUMAN IMMUNODEFICIENCY VIRUS
CTHGIKPV

SEQ ID NO: 6229 - protein, 10 aa, HUMAN IMMUNODEFICIENCY VIRUS
QARVLAVERY

SEQ ID NO: 6230 - protein, 11 aa, HUMAN IMMUNODEFICIENCY VIRUS
QARVLAVERYL

SEQ ID NO: 6231 - protein, 11 aa, HUMAN IMMUNODEFICIENCY VIRUS
EAQQHLLQLTV

SEQ ID NO: 6232 - protein, 8 aa, HUMAN IMMUNODEFICIENCY VIRUS
VTENFNMW

SEQ ID NO: 6233 - protein, 11 aa, HUMAN IMMUNODEFICIENCY VIRUS
AAGSTMGAASI

SEQ ID NO: 6234 - protein, 11 aa, HUMAN IMMUNODEFICIENCY VIRUS
LSIVNRVRQGY

SEQ ID NO: 6235 - protein, 9 aa, HUMAN IMMUNODEFICIENCY VIRUS
EAQQHLLQL

SEQ ID NO: 6236 - protein, 8 aa, HUMAN IMMUNODEFICIENCY VIRUS
RSLCLFSY

SEQ ID NO: 6237 - protein, 10 aa, HUMAN IMMUNODEFICIENCY VIRUS
HSFNCGGEFF

SEQ ID NO: 6238 - protein, 11 aa, HUMAN IMMUNODEFICIENCY VIRUS
HSFNCGGEFFY

SEQ ID NO: 6239 - protein, 8 aa, HUMAN IMMUNODEFICIENCY VIRUS
AASITLTV

SEQ ID NO: 6240 - protein, 9 aa, HUMAN IMMUNODEFICIENCY VIRUS
HSFNCGGEF

SEQ ID NO: 6241 - protein, 9 aa, HUMAN IMMUNODEFICIENCY VIRUS
GAASITLTV

SEQ ID NO: 6242 - protein, 9 aa, HUMAN IMMUNODEFICIENCY VIRUS
LTVQARQLL

SEQ ID NO: 6243 - protein, 8 aa, HUMAN IMMUNODEFICIENCY VIRUS
ITQACPKV

SEQ ID NO: 6244 - protein, 8 aa, HUMAN IMMUNODEFICIENCY VIRUS
LTVQARQL

SEQ ID NO: 6245 - protein, 9 aa, HUMAN IMMUNODEFICIENCY VIRUS
QARQLLSGI

SEQ ID NO: 6246 - protein, 10 aa, HUMAN IMMUNODEFICIENCY VIRUS
QARQLLSGIV

SEQ ID NO: 6247 - protein, 8 aa, HUMAN IMMUNODEFICIENCY VIRUS
STMGAASI

SEQ ID NO: 6248 - protein, 9 aa, HUMAN IMMUNODEFICIENCY VIRUS
GSTMGAASI

SEQ ID NO: 6249 - protein, 10 aa, HUMAN IMMUNODEFICIENCY VIRUS
STMGAASITL

SEQ ID NO: 6250 - protein, 11 aa, HUMAN IMMUNODEFICIENCY VIRUS
GSTMGAASITL

SEQ ID NO: 6251 - protein, 8 aa, HUMAN IMMUNODEFICIENCY VIRUS
QACPKVSF

SEQ ID NO: 6252 - protein, 8 aa, HUMAN IMMUNODEFICIENCY VIRUS
CASDAKAY

SEQ ID NO: 6253 - protein, 10 aa, HUMAN IMMUNODEFICIENCY VIRUS
RAIEAQQHLL

SEQ ID NO: 6254 - protein, 9 aa, HUMAN IMMUNODEFICIENCY VIRUS
RAIEAQQHL

SEQ ID NO: 6255 - protein, 8 aa, HUMAN IMMUNODEFICIENCY VIRUS
ISLWDQSL

SEQ ID NO: 6256 - protein, 9 aa, HUMAN IMMUNODEFICIENCY VIRUS
QSLKPCVKL

SEQ ID NO: 6257 - protein, 10 aa, HUMAN IMMUNODEFICIENCY VIRUS
RSELYKYKVV

SEQ ID NO: 6258 - protein, 9 aa, HUMAN IMMUNODEFICIENCY VIRUS
RSELYKYKV

SEQ ID NO: 6259 - protein, 9 aa, HUMAN IMMUNODEFICIENCY VIRUS
STVQCTHGI

SEQ ID NO: 6260 - protein, 10 aa, HUMAN IMMUNODEFICIENCY VIRUS
VSTVQCTHGI

SEQ ID NO: 6261 - protein, 8 aa, HUMAN IMMUNODEFICIENCY VIRUS
LTPLCVTL

SEQ ID NO: 6262 - protein, 9 aa, HUMAN IMMUNODEFICIENCY VIRUS
VTVYYGVPV

SEQ ID NO: 6263 - protein, 10 aa, HUMAN IMMUNODEFICIENCY VIRUS
VTVYYGVPVW

SEQ ID NO: 6264 - protein, 10 aa, HUMAN IMMUNODEFICIENCY VIRUS
STQLLLNGSL

SEQ ID NO: 6265 - protein, 11 aa, HUMAN IMMUNODEFICIENCY VIRUS
VSTQLLLNGSL

SEQ ID NO: 6266 - protein, 9 aa, HUMAN IMMUNODEFICIENCY VIRUS
LTVWGIKQL

SEQ ID NO: 6267 - protein, 8 aa, HUMAN IMMUNODEFICIENCY VIRUS
TAPPPESF

SEQ ID NO: 6268 - protein, 8 aa, HUMAN IMMUNODEFICIENCY VIRUS
ETIDKDLY

SEQ ID NO: 6269 - protein, 9 aa, HUMAN IMMUNODEFICIENCY VIRUS
PTAPPPESF

SEQ ID NO: 6270 - protein, 10 aa, HUMAN IMMUNODEFICIENCY VIRUS
TAPPPESFRF

SEQ ID NO: 6271 - protein, 10 aa, HUMAN IMMUNODEFICIENCY VIRUS
ETIDKDLYPL

SEQ ID NO: 6272 - protein, 10 aa, HUMAN IMMUNODEFICIENCY VIRUS
RTENSLYPPL

SEQ ID NO: 6273 - protein, 11 aa, HUMAN IMMUNODEFICIENCY VIRUS
AAAIMMQKSNF

SEQ ID NO: 6274 - protein, 11 aa, HUMAN IMMUNODEFICIENCY VIRUS
SATIMMQRGNF

SEQ ID NO: 6275 - protein, 11 aa, HUMAN IMMUNODEFICIENCY VIRUS
PTAPPPESFRF

SEQ ID NO: 6276 - protein, 10 aa, HUMAN IMMUNODEFICIENCY VIRUS
GAAAATDSNI

SEQ ID NO: 6277 - protein, 10 aa, HUMAN IMMUNODEFICIENCY VIRUS
AADKGVSQNY

SEQ ID NO: 6278 - protein, 10 aa, HUMAN IMMUNODEFICIENCY VIRUS
AAGTGNSSQV

SEQ ID NO: 6279 - protein, 10 aa, HUMAN IMMUNODEFICIENCY VIRUS
GANSIPVGDI

SEQ ID NO: 6280 - protein, 10 aa, HUMAN IMMUNODEFICIENCY VIRUS
SAQQDLKGGY

SEQ ID NO: 6281 - protein, 10 aa, HUMAN IMMUNODEFICIENCY VIRUS
TAQQDLKGGY

SEQ ID NO: 6282 - protein, 11 aa, HUMAN IMMUNODEFICIENCY VIRUS
GANSIPVGDIY

SEQ ID NO: 6283 - protein, 11 aa, HUMAN IMMUNODEFICIENCY VIRUS
ASAQQDLKGGY

SEQ ID NO: 6284 - protein, 11 aa, HUMAN IMMUNODEFICIENCY VIRUS
ATAQQDLKGGY

SEQ ID NO: 6285 - protein, 11 aa, HUMAN IMMUNODEFICIENCY VIRUS
PAEPTAPPAEI

SEQ ID NO: 6286 - protein, 8 aa, HUMAN IMMUNODEFICIENCY VIRUS
TAPPAESF

SEQ ID NO: 6287 - protein, 9 aa, HUMAN IMMUNODEFICIENCY VIRUS
PTAPPAESF

SEQ ID NO: 6288 - protein, 10 aa, HUMAN IMMUNODEFICIENCY VIRUS
TAPPAESFRF

SEQ ID NO: 6289 - protein, 11 aa, HUMAN IMMUNODEFICIENCY VIRUS
PTAPPAESFRF

SEQ ID NO: 6290 - protein, 8 aa, HUMAN IMMUNODEFICIENCY VIRUS
GTRPGNYV

SEQ ID NO: 6291 - protein, 11 aa, HUMAN IMMUNODEFICIENCY VIRUS
AADKGKVSQNY

SEQ ID NO: 6292 - protein, 10 aa, HUMAN IMMUNODEFICIENCY VIRUS
EADGKVSQNY

SEQ ID NO: 6293 - protein, 10 aa, HUMAN IMMUNODEFICIENCY VIRUS
AAIMMQKSNF

SEQ ID NO: 6294 - protein, 10 aa, HUMAN IMMUNODEFICIENCY VIRUS
TTPSQKQEPI

SEQ ID NO: 6295 - protein, 8 aa, HUMAN IMMUNODEFICIENCY VIRUS
GASLEEMM

SEQ ID NO: 6296 - protein, 9 aa, HUMAN IMMUNODEFICIENCY VIRUS
DTKEALEKI

SEQ ID NO: 6297 - protein, 10 aa, HUMAN IMMUNODEFICIENCY VIRUS
TAPPAESFGF

SEQ ID NO: 6298 - protein, 11 aa, HUMAN IMMUNODEFICIENCY VIRUS
QALSPRTLNAW

SEQ ID NO: 6299 - protein, 11 aa, HUMAN IMMUNODEFICIENCY VIRUS
PTAPPAESFGF

SEQ ID NO: 6300 - protein, 10 aa, HUMAN IMMUNODEFICIENCY VIRUS
ATIMMQRGNF

SEQ ID NO: 6301 - protein, 8 aa, HUMAN IMMUNODEFICIENCY VIRUS
PSQKQEPI

SEQ ID NO: 6302 - protein, 9 aa, HUMAN IMMUNODEFICIENCY VIRUS
SSKGRPGNF

SEQ ID NO: 6303 - protein, 11 aa, HUMAN IMMUNODEFICIENCY VIRUS
TTSTLQEQIAW

SEQ ID NO: 6304 - protein, 8 aa, HUMAN IMMUNODEFICIENCY VIRUS
QALSPRTL

SEQ ID NO: 6305 - protein, 8 aa, HUMAN IMMUNODEFICIENCY VIRUS
ASQEVKNW

SEQ ID NO: 6306 - protein, 9 aa, HUMAN IMMUNODEFICIENCY VIRUS
ASVLSGGEL

SEQ ID NO: 6307 - protein, 9 aa, HUMAN IMMUNODEFICIENCY VIRUS
QASQEVKNW

SEQ ID NO: 6308 - protein, 9 aa, HUMAN IMMUNODEFICIENCY VIRUS
ASQEVKNWM

SEQ ID NO: 6309 - protein, 9 aa, HUMAN IMMUNODEFICIENCY VIRUS
NANPDCKSI

SEQ ID NO: 6310 - protein, 10 aa, HUMAN IMMUNODEFICIENCY VIRUS
RASVLSGGEL

SEQ ID NO: 6311 - protein, 10 aa, HUMAN IMMUNODEFICIENCY VIRUS
QASQEVKNWM

SEQ ID NO: 6312 - protein, 10 aa, HUMAN IMMUNODEFICIENCY VIRUS
NANPDCKSIL

SEQ ID NO: 6313 - protein, 10 aa, HUMAN IMMUNODEFICIENCY VIRUS
PSSKGRPGNF

SEQ ID NO: 6314 - protein, 10 aa, HUMAN IMMUNODEFICIENCY VIRUS
QTGSEELRSL

SEQ ID NO: 6315 - protein, 8 aa, HUMAN IMMUNODEFICIENCY VIRUS
GSEELKSL

SEQ ID NO: 6316 - protein, 8 aa, HUMAN IMMUNODEFICIENCY VIRUS
GTEELRSL

SEQ ID NO: 6317 - protein, 8 aa, HUMAN IMMUNODEFICIENCY VIRUS
ATPQDLNM

SEQ ID NO: 6318 - protein, 8 aa, HUMAN IMMUNODEFICIENCY VIRUS
LTSLRSLF

SEQ ID NO: 6319 - protein, 9 aa, HUMAN IMMUNODEFICIENCY VIRUS
GSEELRSLY

SEQ ID NO: 6320 - protein, 9 aa, HUMAN IMMUNODEFICIENCY VIRUS
GATPQDLNM

SEQ ID NO: 6321 - protein, 9 aa, HUMAN IMMUNODEFICIENCY VIRUS
ATPQDLNMM

SEQ ID NO: 6322 - protein, 9 aa, HUMAN IMMUNODEFICIENCY VIRUS
STLQEQIAW

SEQ ID NO: 6323 - protein, 9 aa, HUMAN IMMUNODEFICIENCY VIRUS
RAEQASQEV

SEQ ID NO: 6324 - protein, 9 aa, HUMAN IMMUNODEFICIENCY VIRUS
KSLFGNDPL

SEQ ID NO: 6325 - protein, 10 aa, HUMAN IMMUNODEFICIENCY VIRUS
ATLYCVHQKI

SEQ ID NO: 6326 - protein, 10 aa, HUMAN IMMUNODEFICIENCY VIRUS
GATPQDLNMM

SEQ ID NO: 6327 - protein, 10 aa, HUMAN IMMUNODEFICIENCY VIRUS
ATPQDLNMML

SEQ ID NO: 6328 - protein, 10 aa, HUMAN IMMUNODEFICIENCY VIRUS
TSTLQEQIAW

SEQ ID NO: 6329 - protein, 10 aa, HUMAN IMMUNODEFICIENCY VIRUS
STLQEQIAWM

SEQ ID NO: 6330 - protein, 11 aa, HUMAN IMMUNODEFICIENCY VIRUS
VATLYCVHQKI

SEQ ID NO: 6331 - protein, 11 aa, HUMAN IMMUNODEFICIENCY VIRUS
GATPQDLNMML

SEQ ID NO: 6332 - protein, 11 aa, HUMAN IMMUNODEFICIENCY VIRUS
TSTLQEQIAWM

SEQ ID NO: 6333 - protein, 11 aa, HUMAN IMMUNODEFICIENCY VIRUS
TSNPPIPVGEI

SEQ ID NO: 6334 - protein, 8 aa, HUMAN IMMUNODEFICIENCY VIRUS
LTSLKSLF

SEQ ID NO: 6335 - protein, 9 aa, HUMAN IMMUNODEFICIENCY VIRUS
YSPTSILDI

SEQ ID NO: 6336 - protein, 10 aa, HUMAN IMMUNODEFICIENCY VIRUS
PSLQTGSEEL

SEQ ID NO: 6337 - protein, 9 aa, HUMAN IMMUNODEFICIENCY VIRUS
NSSQVSQNY

SEQ ID NO: 6338 - protein, 11 aa, HUMAN IMMUNODEFICIENCY VIRUS
NSSQVSQNYPI

SEQ ID NO: 6339 - protein, 9 aa, HUMAN IMMUNODEFICIENCY VIRUS
TSEGCRQIL

SEQ ID NO: 6340 - protein, 10 aa, HUMAN IMMUNODEFICIENCY VIRUS
ETSEGCRQIL

SEQ ID NO: 6341 - protein, 10 aa, HUMAN IMMUNODEFICIENCY VIRUS
AAEWDRVHPV

SEQ ID NO: 6342 - protein, 10 aa, HUMAN IMMUNODEFICIENCY VIRUS
PSNKGRPGNF

SEQ ID NO: 6343 - protein, 10 aa, HUMAN IMMUNODEFICIENCY VIRUS
TAPPEESFRF

SEQ ID NO: 6344 - protein, 11 aa, HUMAN IMMUNODEFICIENCY VIRUS
EAAEWDRVHPV

SEQ ID NO: 6345 - protein, 11 aa, HUMAN IMMUNODEFICIENCY VIRUS
PTAPPEESFRF

SEQ ID NO: 6346 - protein, 8 aa, HUMAN IMMUNODEFICIENCY VIRUS
SSQVSQNY

SEQ ID NO: 6347 - protein, 10 aa, HUMAN IMMUNODEFICIENCY VIRUS
SSQVSQNYPI

SEQ ID NO: 6348 - protein, 11 aa, HUMAN IMMUNODEFICIENCY VIRUS
SSQVSQNYPIV

SEQ ID NO: 6349 - protein, 10 aa, HUMAN IMMUNODEFICIENCY VIRUS
RSLYNTVATL

SEQ ID NO: 6350 - protein, 11 aa, HUMAN IMMUNODEFICIENCY VIRUS
RSLYNTVATLY

SEQ ID NO: 6351 - protein, 8 aa, HUMAN IMMUNODEFICIENCY VIRUS
EAAEWDRV

SEQ ID NO: 6352 - protein, 8 aa, HUMAN IMMUNODEFICIENCY VIRUS
ATQDVKNW

SEQ ID NO: 6353 - protein, 8 aa, HUMAN IMMUNODEFICIENCY VIRUS
TAPPEESF

SEQ ID NO: 6354 - protein, 8 aa, HUMAN IMMUNODEFICIENCY VIRUS
LASLKSLF

SEQ ID NO: 6355 - protein, 9 aa, HUMAN IMMUNODEFICIENCY VIRUS
RAEQATQDV

SEQ ID NO: 6356 - protein, 9 aa, HUMAN IMMUNODEFICIENCY VIRUS
QATQDVKNW

SEQ ID NO: 6357 - protein, 9 aa, HUMAN IMMUNODEFICIENCY VIRUS
ATQDVKNWM

SEQ ID NO: 6358 - protein, 9 aa, HUMAN IMMUNODEFICIENCY VIRUS
PTAPPEESF

SEQ ID NO: 6359 - protein, 10 aa, HUMAN IMMUNODEFICIENCY VIRUS
ATLYCVHQRI

SEQ ID NO: 6360 - protein, 10 aa, HUMAN IMMUNODEFICIENCY VIRUS
QATQDVKNWM

SEQ ID NO: 6361 - protein, 11 aa, HUMAN IMMUNODEFICIENCY VIRUS
VATLYCVHQRI

SEQ ID NO: 6362 - protein, 8 aa, HUMAN IMMUNODEFICIENCY VIRUS
FAVNPGLL

SEQ ID NO: 6363 - protein, 8 aa, HUMAN IMMUNODEFICIENCY VIRUS
TSEGCRQI

SEQ ID NO: 6364 - protein, 8 aa, HUMAN IMMUNODEFICIENCY VIRUS
GSEELRSL

SEQ ID NO: 6365 - protein, 8 aa, HUMAN IMMUNODEFICIENCY VIRUS
TSNPPIPV

SEQ ID NO: 6366 - protein, 8 aa, HUMAN IMMUNODEFICIENCY VIRUS
PAATLEEM

SEQ ID NO: 6367 - protein, 8 aa, HUMAN IMMUNODEFICIENCY VIRUS
AATLEEMM

SEQ ID NO: 6368 - protein, 9 aa, HUMAN IMMUNODEFICIENCY VIRUS
LSGGKLDAW

SEQ ID NO: 6369 - protein, 9 aa, HUMAN IMMUNODEFICIENCY VIRUS
ETSEGCRQI

SEQ ID NO: 6370 - protein, 9 aa, HUMAN IMMUNODEFICIENCY VIRUS
MTSNPPIPV

SEQ ID NO: 6371 - protein, 9 aa, HUMAN IMMUNODEFICIENCY VIRUS
KALGPAATL

SEQ ID NO: 6372 - protein, 9 aa, HUMAN IMMUNODEFICIENCY VIRUS
PAATLEEMM

SEQ ID NO: 6373 - protein, 8 aa, HUMAN IMMUNODEFICIENCY VIRUS
DAWEKIRL

SEQ ID NO: 6374 - protein, 9 aa, HUMAN IMMUNODEFICIENCY VIRUS
LSPRTLNAW

SEQ ID NO: 6375 - protein, 10 aa, HUMAN IMMUNODEFICIENCY VIRUS
ASRELERFAV

SEQ ID NO: 6376 - protein, 10 aa, HUMAN IMMUNODEFICIENCY VIRUS
LSPRTLNAWV

SEQ ID NO: 6377 - protein, 10 aa, HUMAN IMMUNODEFICIENCY VIRUS
HAGPIPPGQM

SEQ ID NO: 6378 - protein, 11 aa, HUMAN IMMUNODEFICIENCY VIRUS
WASRELERFAV

SEQ ID NO: 6379 - protein, 8 aa, HUMAN IMMUNODEFICIENCY VIRUS
ATQEVKNW

SEQ ID NO: 6380 - protein, 9 aa, HUMAN IMMUNODEFICIENCY VIRUS
QATQEVKNW

SEQ ID NO: 6381 - protein, 9 aa, HUMAN IMMUNODEFICIENCY VIRUS
ATQEVKNWM

SEQ ID NO: 6382 - protein, 10 aa, HUMAN IMMUNODEFICIENCY VIRUS
HAGPIAPGQM

SEQ ID NO: 6383 - protein, 10 aa, HUMAN IMMUNODEFICIENCY VIRUS
QATQEVKNWM

SEQ ID NO: 6384 - protein, 8 aa, HUMAN IMMUNODEFICIENCY VIRUS
PSHKARVL

SEQ ID NO: 6385 - protein, 8 aa, HUMAN IMMUNODEFICIENCY VIRUS
TAPPAESF

SEQ ID NO: 6386 - protein, 9 aa, HUMAN IMMUNODEFICIENCY VIRUS
MTNNPPIPV

SEQ ID NO: 6387 - protein, 9 aa, HUMAN IMMUNODEFICIENCY VIRUS
PTAPPAESF

SEQ ID NO: 6388 - protein, 8 aa, HUMAN IMMUNODEFICIENCY VIRUS
FALNPGLL

SEQ ID NO: 6389 - protein, 10 aa, HUMAN IMMUNODEFICIENCY VIRUS
ASRELERFAL

SEQ ID NO: 6390 - protein, 10 aa, HUMAN IMMUNODEFICIENCY VIRUS
ETINEEAAEW

SEQ ID NO: 6391 - protein, 11 aa, HUMAN IMMUNODEFICIENCY VIRUS
WASRELERFAL

SEQ ID NO: 6392 - protein, 10 aa, HUMAN IMMUNODEFICIENCY VIRUS
PSHKGRPGNF

SEQ ID NO: 6393 - protein, 11 aa, HUMAN IMMUNODEFICIENCY VIRUS
PSHKGRPGNFL

SEQ ID NO: 6394 - protein, 10 aa, HUMAN IMMUNODEFICIENCY VIRUS
AAMQMLKETI

SEQ ID NO: 6395 - protein, 11 aa, HUMAN IMMUNODEFICIENCY VIRUS
QAAMQMLKETI

SEQ ID NO: 6396 - protein, 11 aa, HUMAN IMMUNODEFICIENCY VIRUS
TTSTLQEQIGW

SEQ ID NO: 6397 - protein, 9 aa, HUMAN IMMUNODEFICIENCY VIRUS
STLQEQIGW

SEQ ID NO: 6398 - protein, 9 aa, HUMAN IMMUNODEFICIENCY VIRUS
RAEQATQEV

SEQ ID NO: 6399 - protein, 10 aa, HUMAN IMMUNODEFICIENCY VIRUS
TSTLQEQIGW

SEQ ID NO: 6400 - protein, 10 aa, HUMAN IMMUNODEFICIENCY VIRUS
STLQEQIGWM

SEQ ID NO: 6401 - protein, 11 aa, HUMAN IMMUNODEFICIENCY VIRUS
TSTLQEQIGWM

SEQ ID NO: 6402 - protein, 11 aa, HUMAN IMMUNODEFICIENCY VIRUS
VSQNYPIVQNL

SEQ ID NO: 6403 - protein, 9 aa, HUMAN IMMUNODEFICIENCY VIRUS
ASVLSGGKL

SEQ ID NO: 6404 - protein, 10 aa, HUMAN IMMUNODEFICIENCY VIRUS
RASVLSGGKL

SEQ ID NO: 6405 - protein, 8 aa, HUMAN IMMUNODEFICIENCY VIRUS
QAISPRTL

SEQ ID NO: 6406 - protein, 8 aa, HUMAN IMMUNODEFICIENCY VIRUS
GATLEEMM

SEQ ID NO: 6407 - protein, 11 aa, HUMAN IMMUNODEFICIENCY VIRUS
QAISPRTLNAW

SEQ ID NO: 6408 - protein, 10 aa, HUMAN IMMUNODEFICIENCY VIRUS
RTLNAWVKVI

SEQ ID NO: 6409 - protein, 10 aa, HUMAN IMMUNODEFICIENCY VIRUS
RTLNAWVKVV

SEQ ID NO: 6410 - protein, 10 aa, HUMAN IMMUNODEFICIENCY VIRUS
DTINEEAAEW

SEQ ID NO: 6411 - protein, 9 aa, HUMAN IMMUNODEFICIENCY VIRUS
DTKEALDKI

SEQ ID NO: 6412 - protein, 10 aa, HUMAN IMMUNODEFICIENCY VIRUS
AAMQMLKDTI

SEQ ID NO: 6413 - protein, 11 aa, HUMAN IMMUNODEFICIENCY VIRUS
QAAMQMLKDTI

SEQ ID NO: 6414 - protein, 10 aa, HUMAN IMMUNODEFICIENCY VIRUS
AAEWDRLHPV

SEQ ID NO: 6415 - protein, 11 aa, HUMAN IMMUNODEFICIENCY VIRUS
EAAEWDRLHPV

SEQ ID NO: 6416 - protein, 8 aa, HUMAN IMMUNODEFICIENCY VIRUS
LAEAMSQV

SEQ ID NO: 6417 - protein, 9 aa, HUMAN IMMUNODEFICIENCY VIRUS
ISPRTLNAW

SEQ ID NO: 6418 - protein, 10 aa, HUMAN IMMUNODEFICIENCY VIRUS
ISPRTLNAWV

SEQ ID NO: 6419 - protein, 8 aa, HUMAN IMMUNODEFICIENCY VIRUS
EAAEWDRL

SEQ ID NO: 6420 - protein, 9 aa, HUMAN IMMUNODEFICIENCY VIRUS
YSPVSILDI

SEQ ID NO: 6421 - protein, 9 aa, HUMAN IMMUNODEFICIENCY VIRUS
NTVATLYCV

SEQ ID NO: 6422 - protein, 9 aa, HUMAN IMMUNODEFICIENCY VIRUS
ATPQDLNTM

SEQ ID NO: 6423 - protein, 10 aa, HUMAN IMMUNODEFICIENCY VIRUS
GATPQDLNTM

SEQ ID NO: 6424 - protein, 10 aa, HUMAN IMMUNODEFICIENCY VIRUS
ATPQDLNTML

SEQ ID NO: 6425 - protein, 11 aa, HUMAN IMMUNODEFICIENCY VIRUS
GATPQDLNTML

SEQ ID NO: 6426 - protein, 9 aa, HUMAN IMMUNODEFICIENCY VIRUS
TTSTLQEQI

SEQ ID NO: 6427 - protein, 9 aa, HUMAN IMMUNODEFICIENCY VIRUS
NANPDCKTI

SEQ ID NO: 6428 - protein, 10 aa, HUMAN IMMUNODEFICIENCY VIRUS
GTTSTLQEQI

SEQ ID NO: 6429 - protein, 10 aa, HUMAN IMMUNODEFICIENCY VIRUS
NANPDCKTIL

SEQ ID NO: 6430 - protein, 8 aa, HUMAN IMMUNODEFICIENCY VIRUS
ASRELERF

SEQ ID NO: 6431 - protein, 9 aa, HUMAN IMMUNODEFICIENCY VIRUS
WASRELERF

SEQ ID NO: 6432 - protein, 8 aa, HUMAN IMMUNODEFICIENCY VIRUS
TSTLQEQI

SEQ ID NO: 6433 - protein, 10 aa, HUMAN IMMUNODEFICIENCY VIRUS
NTVGGHQAAM

SEQ ID NO: 6434 - protein, 11 aa, HUMAN IMMUNODEFICIENCY VIRUS
GSDIAGTTSTL

SEQ ID NO: 6435 - protein, 8 aa, HUMAN IMMUNODEFICIENCY VIRUS
VSQNYPIV

SEQ ID NO: 6436 - protein, 8 aa, HUMAN IMMUNODEFICIENCY VIRUS
IAGTTSTL

SEQ ID NO: 6437 - protein, 8 aa, HUMAN IMMUNODEFICIENCY VIRUS
KAFSPEVI

SEQ ID NO: 6438 - protein, 10 aa, HUMAN IMMUNODEFICIENCY VIRUS
KAFSPEVIPM

SEQ ID NO: 6439 - protein, 11 aa, HUMAN IMMUNODEFICIENCY VIRUS
KAFSPEVIPMF

SEQ ID NO: 6440 - protein, 9 aa, HUMAN IMMUNODEFICIENCY VIRUS
RAPRKKGCW

SEQ ID NO: 6441 - protein, 8 aa, HUMAN IMMUNODEFICIENCY VIRUS
FSPEVIPM

SEQ ID NO: 6442 - protein, 9 aa, HUMAN IMMUNODEFICIENCY VIRUS
FSPEVIPMF

SEQ ID NO: 6443 - protein, 8 aa, HUMAN IMMUNODEFICIENCY VIRUS
CTERQANF

SEQ ID NO: 6444 - protein, 9 aa, HUMAN IMMUNODEFICIENCY VIRUS
CTERQANFL

SEQ ID NO: 6445 - protein, 8 aa, HUMAN IMMUNODEFICIENCY VIRUS
QANFLGKI

SEQ ID NO: 6446 - protein, 9 aa, HUMAN IMMUNODEFICIENCY VIRUS
KARVLAEAM

SEQ ID NO: 6447 - protein, 9 aa, HUMAN IMMUNODEFICIENCY VIRUS
QANFLGKIW

SEQ ID NO: 6448 - protein, 10 aa, HUMAN IMMUNODEFICIENCY VIRUS
LSEGATPQDL

SEQ ID NO: 6449 - protein, 9 aa, HUMAN IMMUNODEFICIENCY VIRUS
RTLNAWVKV

SEQ ID NO: 6450 - protein, 9 aa, HUMAN IMMUNODEFICIENCY VIRUS
QAEPAAAGV

SEQ ID NO: 6451 - protein, 9 aa, HUMAN IMMUNODEFICIENCY VIRUS
QTEPAAVGV

SEQ ID NO: 6452 - protein, 9 aa, HUMAN IMMUNODEFICIENCY VIRUS
RAEPAADGV

SEQ ID NO: 6453 - protein, 9 aa, HUMAN IMMUNODEFICIENCY VIRUS
RTEPAAVGV

SEQ ID NO: 6454 - protein, 9 aa, HUMAN IMMUNODEFICIENCY VIRUS
QAEPAAEGV

SEQ ID NO: 6455 - protein, 9 aa, HUMAN IMMUNODEFICIENCY VIRUS
QAPTAAKGV

SEQ ID NO: 6456 - protein, 11 aa, HUMAN IMMUNODEFICIENCY VIRUS
RAQAEPAAAGV

SEQ ID NO: 6457 - protein, 8 aa, HUMAN IMMUNODEFICIENCY VIRUS
GAFDLSFF

SEQ ID NO: 6458 - protein, 9 aa, HUMAN IMMUNODEFICIENCY VIRUS
GAFDLSFFL

SEQ ID NO: 6459 - protein, 9 aa, HUMAN IMMUNODEFICIENCY VIRUS
MARELHPEY

SEQ ID NO: 6460 - protein, 10 aa, HUMAN IMMUNODEFICIENCY VIRUS
MARELHPEYY

SEQ ID NO: 6461 - protein, 8 aa, HUMAN IMMUNODEFICIENCY VIRUS
AADGVGAV

SEQ ID NO: 6462 - protein, 9 aa, HUMAN IMMUNODEFICIENCY VIRUS
PAADGVGAV

SEQ ID NO: 6463 - protein, 11 aa, HUMAN IMMUNODEFICIENCY VIRUS
VSRDLEKHGAI

SEQ ID NO: 6464 - protein, 8 aa, HUMAN IMMUNODEFICIENCY VIRUS
ATNADCAW

SEQ ID NO: 6465 - protein, 9 aa, HUMAN IMMUNODEFICIENCY VIRUS
AATNADCAW

SEQ ID NO: 6466 - protein, 9 aa, HUMAN IMMUNODEFICIENCY VIRUS
ATNADCAWL

SEQ ID NO: 6467 - protein, 10 aa, HUMAN IMMUNODEFICIENCY VIRUS
AATNADCAWL

SEQ ID NO: 6468 - protein, 9 aa, HUMAN IMMUNODEFICIENCY VIRUS
PAAEGVGAV

SEQ ID NO: 6469 - protein, 9 aa, HUMAN IMMUNODEFICIENCY VIRUS
MTYKGAFDL

SEQ ID NO: 6470 - protein, 9 aa, HUMAN IMMUNODEFICIENCY VIRUS
NTQGYFPDW

SEQ ID NO: 6471 - protein, 10 aa, HUMAN IMMUNODEFICIENCY VIRUS
TAATNADCAW

SEQ ID NO: 6472 - protein, 10 aa, HUMAN IMMUNODEFICIENCY VIRUS
GTRFPLTFGW

SEQ ID NO: 6473 - protein, 11 aa, HUMAN IMMUNODEFICIENCY VIRUS
NTAATNADCAW

SEQ ID NO: 6474 - protein, 11 aa, HUMAN IMMUNODEFICIENCY VIRUS
TAATNADCAWL

SEQ ID NO: 6475 - protein, 8 aa, HUMAN IMMUNODEFICIENCY VIRUS
GTRFPLTF

SEQ ID NO: 6476 - protein, 9 aa, HUMAN IMMUNODEFICIENCY VIRUS
YTPGPGTRF

SEQ ID NO: 6477 - protein, 11 aa, HUMAN IMMUNODEFICIENCY VIRUS
YTPGPGTRFPL

SEQ ID NO: 6478 - protein, 9 aa, HUMAN IMMUNODEFICIENCY VIRUS
HTQGFFPDW

SEQ ID NO: 6479 - protein, 8 aa, HUMAN IMMUNODEFICIENCY VIRUS
EAQEEEEV

SEQ ID NO: 6480 - protein, 10 aa, HUMAN IMMUNODEFICIENCY VIRUS
EAQEEEEVGF

SEQ ID NO: 6481 - protein, 11 aa, HUMAN IMMUNODEFICIENCY VIRUS
YTPGPGIRYPL

SEQ ID NO: 6482 - protein, 8 aa, HUMAN IMMUNODEFICIENCY VIRUS
AAEGVGAV

SEQ ID NO: 6483 - protein, 9 aa, HUMAN IMMUNODEFICIENCY VIRUS
YTPGPGIRY

SEQ ID NO: 6484 - protein, 9 aa, HUMAN IMMUNODEFICIENCY VIRUS
WSKSSIVGW

SEQ ID NO: 6485 - protein, 8 aa, HUMAN IMMUNODEFICIENCY VIRUS
YSKKRQEI

SEQ ID NO: 6486 - protein, 9 aa, HUMAN IMMUNODEFICIENCY VIRUS
YSKKRQEIL

SEQ ID NO: 6487 - protein, 11 aa, HUMAN IMMUNODEFICIENCY VIRUS
LSFFLKEKGGL

SEQ ID NO: 6488 - protein, 11 aa, HUMAN IMMUNODEFICIENCY VIRUS
YSKKRQEILDL

SEQ ID NO: 6489 - protein, 9 aa, HUMAN IMMUNODEFICIENCY VIRUS
HTQGYFPDW

SEQ ID NO: 6490 - protein, 11 aa, HUMAN IMMUNODEFICIENCY VIRUS
LSHFLKEKGGL

SEQ ID NO: 6491 - protein, 10 aa, HUMAN IMMUNODEFICIENCY VIRUS
LTFGWCFKLV

SEQ ID NO: 6492 - protein, 9 aa, HUMAN IMMUNODEFICIENCY VIRUS
LTFGWCFKL

SEQ ID NO: 6493 - protein, 8 aa, HUMAN IMMUNODEFICIENCY VIRUS
NSPTSREL

SEQ ID NO: 6494 - protein, 8 aa, HUMAN IMMUNODEFICIENCY VIRUS
PTSRELQV

SEQ ID NO: 6495 - protein, 8 aa, HUMAN IMMUNODEFICIENCY VIRUS
GTLNCPQI

SEQ ID NO: 6496 - protein, 8 aa, HUMAN IMMUNODEFICIENCY VIRUS
PTFNFPQI

SEQ ID NO: 6497 - protein, 10 aa, HUMAN IMMUNODEFICIENCY VIRUS
STNSPTSREL

SEQ ID NO: 6498 - protein, 10 aa, HUMAN IMMUNODEFICIENCY VIRUS
NSPTSRELQV

SEQ ID NO: 6499 - protein, 10 aa, HUMAN IMMUNODEFICIENCY VIRUS
RANSPSSREL

SEQ ID NO: 6500 - protein, 10 aa, HUMAN IMMUNODEFICIENCY VIRUS
GTLNCPQITL

SEQ ID NO: 6501 - protein, 10 aa, HUMAN IMMUNODEFICIENCY VIRUS
PTFNFPQITL

SEQ ID NO: 6502 - protein, 11 aa, HUMAN IMMUNODEFICIENCY VIRUS
NSTNSPTSREL

SEQ ID NO: 6503 - protein, 11 aa, HUMAN IMMUNODEFICIENCY VIRUS
GTLNCPQITLW

SEQ ID NO: 6504 - protein, 11 aa, HUMAN IMMUNODEFICIENCY VIRUS
PTFNFPQITLW

SEQ ID NO: 6505 - protein, 8 aa, HUMAN IMMUNODEFICIENCY VIRUS
NSPSSREL

SEQ ID NO: 6506 - protein, 8 aa, HUMAN IMMUNODEFICIENCY VIRUS
NSPTTREL

SEQ ID NO: 6507 - protein, 8 aa, HUMAN IMMUNODEFICIENCY VIRUS
PSSRELQV

SEQ ID NO: 6508 - protein, 10 aa, HUMAN IMMUNODEFICIENCY VIRUS
NSPSSRELQV

SEQ ID NO: 6509 - protein, 10 aa, HUMAN IMMUNODEFICIENCY VIRUS
RANSPTTREL

SEQ ID NO: 6510 - protein, 10 aa, HUMAN IMMUNODEFICIENCY VIRUS
NSPTTRELQV

SEQ ID NO: 6511 - protein, 8 aa, HUMAN IMMUNODEFICIENCY VIRUS
GADRQGIV

SEQ ID NO: 6512 - protein, 8 aa, HUMAN IMMUNODEFICIENCY VIRUS
GSGRAVPI

SEQ ID NO: 6513 - protein, 10 aa, HUMAN IMMUNODEFICIENCY VIRUS
GADRQGIVSF

SEQ ID NO: 6514 - protein, 10 aa, HUMAN IMMUNODEFICIENCY VIRUS
GSGRAVPICL

SEQ ID NO: 6515 - protein, 9 aa, HUMAN IMMUNODEFICIENCY VIRUS
GTTLNFPQI

SEQ ID NO: 6516 - protein, 10 aa, HUMAN IMMUNODEFICIENCY VIRUS
GAISLSLPQI

SEQ ID NO: 6517 - protein, 11 aa, HUMAN IMMUNODEFICIENCY VIRUS
GTTLNFPQITF

SEQ ID NO: 6518 - protein, 8 aa, HUMAN IMMUNODEFICIENCY VIRUS
PSLSFPQI

SEQ ID NO: 6519 - protein, 10 aa, HUMAN IMMUNODEFICIENCY VIRUS
PSLSFPQITL

SEQ ID NO: 6520 - protein, 11 aa, HUMAN IMMUNODEFICIENCY VIRUS
PSLSFPQITLW

SEQ ID NO: 6521 - protein, 8 aa, HUMAN IMMUNODEFICIENCY VIRUS
SSFSFPQI

SEQ ID NO: 6522 - protein, 10 aa, HUMAN IMMUNODEFICIENCY VIRUS
SSFSFPQITL

SEQ ID NO: 6523 - protein, 11 aa, HUMAN IMMUNODEFICIENCY VIRUS
SSFSFPQITLW

SEQ ID NO: 6524 - protein, 11 aa, HUMAN IMMUNODEFICIENCY VIRUS
VSFSFPQITLW

SEQ ID NO: 6525 - protein, 8 aa, HUMAN IMMUNODEFICIENCY VIRUS
VSFSFPQI

SEQ ID NO: 6526 - protein, 10 aa, HUMAN IMMUNODEFICIENCY VIRUS
VSFSFPQITL

SEQ ID NO: 6527 - protein, 8 aa, HUMAN IMMUNODEFICIENCY VIRUS
ETWWTDYW

SEQ ID NO: 6528 - protein, 10 aa, HUMAN IMMUNODEFICIENCY VIRUS
RANSPTSREL

SEQ ID NO: 6529 - protein, 10 aa, HUMAN IMMUNODEFICIENCY VIRUS
ETWETWWTDY

SEQ ID NO: 6530 - protein, 10 aa, HUMAN IMMUNODEFICIENCY VIRUS
ETWETWWTEY

SEQ ID NO: 6531 - protein, 10 aa, HUMAN IMMUNODEFICIENCY VIRUS
QTKELQKQII

SEQ ID NO: 6532 - protein, 11 aa, HUMAN IMMUNODEFICIENCY VIRUS
LAFPQGEAREF

SEQ ID NO: 6533 - protein, 11 aa, HUMAN IMMUNODEFICIENCY VIRUS
RSAHTNDVKQL

SEQ ID NO: 6534 - protein, 11 aa, HUMAN IMMUNODEFICIENCY VIRUS
EAVQKIATESI

SEQ ID NO: 6535 - protein, 11 aa, HUMAN IMMUNODEFICIENCY VIRUS
ETWETWWTDYW

SEQ ID NO: 6536 - protein, 8 aa, HUMAN IMMUNODEFICIENCY VIRUS
RTAHTNDV

SEQ ID NO: 6537 - protein, 8 aa, HUMAN IMMUNODEFICIENCY VIRUS
WAGIQQEF

SEQ ID NO: 6538 - protein, 9 aa, HUMAN IMMUNODEFICIENCY VIRUS
VTVKIGGQL

SEQ ID NO: 6539 - protein, 9 aa, HUMAN IMMUNODEFICIENCY VIRUS
STNNETPGI

SEQ ID NO: 6540 - protein, 9 aa, HUMAN IMMUNODEFICIENCY VIRUS
GTKALTEVI

SEQ ID NO: 6541 - protein, 9 aa, HUMAN IMMUNODEFICIENCY VIRUS
GSNFTSTTV

SEQ ID NO: 6542 - protein, 10 aa, HUMAN IMMUNODEFICIENCY VIRUS
GADDTVLEEM

SEQ ID NO: 6543 - protein, 10 aa, HUMAN IMMUNODEFICIENCY VIRUS
ISRIGPENPY

SEQ ID NO: 6544 - protein, 10 aa, HUMAN IMMUNODEFICIENCY VIRUS
PSTNNETPGI

SEQ ID NO: 6545 - protein, 10 aa, HUMAN IMMUNODEFICIENCY VIRUS
TAHTNDVKQL

SEQ ID NO: 6546 - protein, 10 aa, HUMAN IMMUNODEFICIENCY VIRUS
WAGIQQEFGI

SEQ ID NO: 6547 - protein, 11 aa, HUMAN IMMUNODEFICIENCY VIRUS
STNNETPGIRY

SEQ ID NO: 6548 - protein, 11 aa, HUMAN IMMUNODEFICIENCY VIRUS
ESWTVNDIQKL

SEQ ID NO: 6549 - protein, 11 aa, HUMAN IMMUNODEFICIENCY VIRUS
GTKALTEVIPL

SEQ ID NO: 6550 - protein, 8 aa, HUMAN IMMUNODEFICIENCY VIRUS
ESWTVNDI

SEQ ID NO: 6551 - protein, 8 aa, HUMAN IMMUNODEFICIENCY VIRUS
KTELQAIY

SEQ ID NO: 6552 - protein, 9 aa, HUMAN IMMUNODEFICIENCY VIRUS
KTELQAIYL

SEQ ID NO: 6553 - protein, 11 aa, HUMAN IMMUNODEFICIENCY VIRUS
NSPTRRELQVW

SEQ ID NO: 6554 - protein, 11 aa, HUMAN IMMUNODEFICIENCY VIRUS
TTNQKTELHAI

SEQ ID NO: 6555 - protein, 11 aa, HUMAN IMMUNODEFICIENCY VIRUS
KTELQAIYLAL

SEQ ID NO: 6556 - protein, 11 aa, HUMAN IMMUNODEFICIENCY VIRUS
GAVVIQDNSEI

SEQ ID NO: 6557 - protein, 8 aa, HUMAN IMMUNODEFICIENCY VIRUS
KTGKYARM

SEQ ID NO: 6558 - protein, 8 aa, HUMAN IMMUNODEFICIENCY VIRUS
WTVQPIVL

SEQ ID NO: 6559 - protein, 9 aa, HUMAN IMMUNODEFICIENCY VIRUS
PTRRELQVW

SEQ ID NO: 6560 - protein, 9 aa, HUMAN IMMUNODEFICIENCY VIRUS
DTVLEDINL

SEQ ID NO: 6561 - protein, 10 aa, HUMAN IMMUNODEFICIENCY VIRUS
NSPTRRELQV

SEQ ID NO: 6562 - protein, 10 aa, HUMAN IMMUNODEFICIENCY VIRUS
LAGRWPVKTI

SEQ ID NO: 6563 - protein, 11 aa, HUMAN IMMUNODEFICIENCY VIRUS
RAKIEELREHL

SEQ ID NO: 6564 - protein, 8 aa, HUMAN IMMUNODEFICIENCY VIRUS
IATESIVI

SEQ ID NO: 6565 - protein, 9 aa, HUMAN IMMUNODEFICIENCY VIRUS
IATESIVIW

SEQ ID NO: 6566 - protein, 8 aa, HUMAN IMMUNODEFICIENCY VIRUS
NSPTSREL

SEQ ID NO: 6567 - protein, 8 aa, HUMAN IMMUNODEFICIENCY VIRUS
PTRRELQV

SEQ ID NO: 6568 - protein, 9 aa, HUMAN IMMUNODEFICIENCY VIRUS
FSFPQITLW

SEQ ID NO: 6569 - protein, 9 aa, HUMAN IMMUNODEFICIENCY VIRUS
DTVLEEINL

SEQ ID NO: 6570 - protein, 9 aa, HUMAN IMMUNODEFICIENCY VIRUS
WTDYWQATW

SEQ ID NO: 6571 - protein, 9 aa, HUMAN IMMUNODEFICIENCY VIRUS
SAGERIVDI

SEQ ID NO: 6572 - protein, 9 aa, HUMAN IMMUNODEFICIENCY VIRUS
ASDIQTKEL

SEQ ID NO: 6573 - protein, 10 aa, HUMAN IMMUNODEFICIENCY VIRUS
WTDYWQATWI

SEQ ID NO: 6574 - protein, 10 aa, HUMAN IMMUNODEFICIENCY VIRUS
TSTTVKAACW

SEQ ID NO: 6575 - protein, 10 aa, HUMAN IMMUNODEFICIENCY VIRUS
YSAGERIVDI

SEQ ID NO: 6576 - protein, 10 aa, HUMAN IMMUNODEFICIENCY VIRUS
SAGERIVDII

SEQ ID NO: 6577 - protein, 10 aa, HUMAN IMMUNODEFICIENCY VIRUS
IASDIQTKEL

SEQ ID NO: 6578 - protein, 11 aa, HUMAN IMMUNODEFICIENCY VIRUS
RTKIEELRQHL

SEQ ID NO: 6579 - protein, 11 aa, HUMAN IMMUNODEFICIENCY VIRUS
FTSTTVKAACW

SEQ ID NO: 6580 - protein, 11 aa, HUMAN IMMUNODEFICIENCY VIRUS
TSTTVKAACWW

SEQ ID NO: 6581 - protein, 11 aa, HUMAN IMMUNODEFICIENCY VIRUS
YSAGERIVDII

SEQ ID NO: 6582 - protein, 10 aa, HUMAN IMMUNODEFICIENCY VIRUS
KALVEICTEM

SEQ ID NO: 6583 - protein, 8 aa, HUMAN IMMUNODEFICIENCY VIRUS
FSFPQITL

SEQ ID NO: 6584 - protein, 8 aa, HUMAN IMMUNODEFICIENCY VIRUS
LTQLGCTL

SEQ ID NO: 6585 - protein, 8 aa, HUMAN IMMUNODEFICIENCY VIRUS
RSAHTNDV

SEQ ID NO: 6586 - protein, 8 aa, HUMAN IMMUNODEFICIENCY VIRUS
VSAGIRKV

SEQ ID NO: 6587 - protein, 8 aa, HUMAN IMMUNODEFICIENCY VIRUS
SAGIRKVL

SEQ ID NO: 6588 - protein, 8 aa, HUMAN IMMUNODEFICIENCY VIRUS
TTVKAACW

SEQ ID NO: 6589 - protein, 9 aa, HUMAN IMMUNODEFICIENCY VIRUS
KTELQAIHL

SEQ ID NO: 6590 - protein, 9 aa, HUMAN IMMUNODEFICIENCY VIRUS
VSAGIRKVL

SEQ ID NO: 6591 - protein, 9 aa, HUMAN IMMUNODEFICIENCY VIRUS
SAGIRKVLF

SEQ ID NO: 6592 - protein, 9 aa, HUMAN IMMUNODEFICIENCY VIRUS
STTVKAACW

SEQ ID NO: 6593 - protein, 9 aa, HUMAN IMMUNODEFICIENCY VIRUS
TTVKAACWW

SEQ ID NO: 6594 - protein, 10 aa, HUMAN IMMUNODEFICIENCY VIRUS
GADDTVLEDI

SEQ ID NO: 6595 - protein, 10 aa, HUMAN IMMUNODEFICIENCY VIRUS
LTQLGCTLNF

SEQ ID NO: 6596 - protein, 10 aa, HUMAN IMMUNODEFICIENCY VIRUS
LTEEKIKALV

SEQ ID NO: 6597 - protein, 10 aa, HUMAN IMMUNODEFICIENCY VIRUS
VSAGIRKVLF

SEQ ID NO: 6598 - protein, 10 aa, HUMAN IMMUNODEFICIENCY VIRUS
SAGIRKVLFL

SEQ ID NO: 6599 - protein, 10 aa, HUMAN IMMUNODEFICIENCY VIRUS
STTVKAACWW

SEQ ID NO: 6600 - protein, 11 aa, HUMAN IMMUNODEFICIENCY VIRUS
KTELQAIHLAL

SEQ ID NO: 6601 - protein, 11 aa, HUMAN IMMUNODEFICIENCY VIRUS
VSAGIRKVLFL

SEQ ID NO: 6602 - protein, 9 aa, HUMAN IMMUNODEFICIENCY VIRUS
KAQEEHERY

SEQ ID NO: 6603 - protein, 8 aa, HUMAN IMMUNODEFICIENCY VIRUS
YSAGERIV

SEQ ID NO: 6604 - protein, 9 aa, HUMAN IMMUNODEFICIENCY VIRUS
KALTEVIPL

SEQ ID NO: 6605 - protein, 10 aa, HUMAN IMMUNODEFICIENCY VIRUS
RANSPTRREL

SEQ ID NO: 6606 - protein, 10 aa, HUMAN IMMUNODEFICIENCY VIRUS
SAHTNDVKQL

SEQ ID NO: 6607 - protein, 8 aa, HUMAN IMMUNODEFICIENCY VIRUS
NSPTRREL

SEQ ID NO: 6608 - protein, 9 aa, HUMAN IMMUNODEFICIENCY VIRUS
VTIKIGGQL

SEQ ID NO: 6609 - protein, 9 aa, HUMAN IMMUNODEFICIENCY VIRUS
KTPKFKLPI

SEQ ID NO: 6610 - protein, 11 aa, HUMAN IMMUNODEFICIENCY VIRUS
GAKALTDIVPL

SEQ ID NO: 6611 - protein, 9 aa, HUMAN IMMUNODEFICIENCY VIRUS
FSVPLDKDF

SEQ ID NO: 6612 - protein, 9 aa, HUMAN IMMUNODEFICIENCY VIRUS
YAGIKVKQL

SEQ ID NO: 6613 - protein, 10 aa, HUMAN IMMUNODEFICIENCY VIRUS
GADDTVLEEI

SEQ ID NO: 6614 - protein, 11 aa, HUMAN IMMUNODEFICIENCY VIRUS
ITLWQRPLVTV

SEQ ID NO: 6615 - protein, 8 aa, HUMAN IMMUNODEFICIENCY VIRUS
KTGKYAKM

SEQ ID NO: 6616 - protein, 8 aa, HUMAN IMMUNODEFICIENCY VIRUS
GTKALTEV

SEQ ID NO: 6617 - protein, 8 aa, HUMAN IMMUNODEFICIENCY VIRUS
ATESIVIW

SEQ ID NO: 6618 - protein, 10 aa, HUMAN IMMUNODEFICIENCY VIRUS
GAHTNDVKQL

SEQ ID NO: 6619 - protein, 10 aa, HUMAN IMMUNODEFICIENCY VIRUS
KSESELVNQI

SEQ ID NO: 6620 - protein, 10 aa, HUMAN IMMUNODEFICIENCY VIRUS
KSESELVSQI

SEQ ID NO: 6621 - protein, 11 aa, HUMAN IMMUNODEFICIENCY VIRUS
ITLWQRPLVTI

SEQ ID NO: 6622 - protein, 11 aa, HUMAN IMMUNODEFICIENCY VIRUS
LTDTTNQKTEL

SEQ ID NO: 6623 - protein, 11 aa, HUMAN IMMUNODEFICIENCY VIRUS
KSESELVNQII

SEQ ID NO: 6624 - protein, 11 aa, HUMAN IMMUNODEFICIENCY VIRUS
KSESELVSQII

SEQ ID NO: 6625 - protein, 8 aa, HUMAN IMMUNODEFICIENCY VIRUS
VSQIIEQL

SEQ ID NO: 6626 - protein, 9 aa, HUMAN IMMUNODEFICIENCY VIRUS
VSQIIEQLI

SEQ ID NO: 6627 - protein, 11 aa, HUMAN IMMUNODEFICIENCY VIRUS
MASDFNLPPIV

SEQ ID NO: 6628 - protein, 8 aa, HUMAN IMMUNODEFICIENCY VIRUS
ESELVSQI

SEQ ID NO: 6629 - protein, 8 aa, HUMAN IMMUNODEFICIENCY VIRUS
WAGIKQEF

SEQ ID NO: 6630 - protein, 9 aa, HUMAN IMMUNODEFICIENCY VIRUS
KALTDIVPL

SEQ ID NO: 6631 - protein, 9 aa, HUMAN IMMUNODEFICIENCY VIRUS
ESELVSQII

SEQ ID NO: 6632 - protein, 10 aa, HUMAN IMMUNODEFICIENCY VIRUS
ASDFNLPPIV

SEQ ID NO: 6633 - protein, 10 aa, HUMAN IMMUNODEFICIENCY VIRUS
WAGIKQEFGI

SEQ ID NO: 6634 - protein, 10 aa, HUMAN IMMUNODEFICIENCY VIRUS
LAWVPAHKGI

SEQ ID NO: 6635 - protein, 10 aa, HUMAN IMMUNODEFICIENCY VIRUS
MASDFNLPPI

SEQ ID NO: 6636 - protein, 10 aa, HUMAN IMMUNODEFICIENCY VIRUS
LAGRWPVKVI

SEQ ID NO: 6637 - protein, 9 aa, HUMAN IMMUNODEFICIENCY VIRUS
ASDFNLPPI

SEQ ID NO: 6638 - protein, 10 aa, HUMAN IMMUNODEFICIENCY VIRUS
CTHLEGKVIL

SEQ ID NO: 6639 - protein, 11 aa, HUMAN IMMUNODEFICIENCY VIRUS
CTHLEGKVILV

SEQ ID NO: 6640 - protein, 9 aa, HUMAN IMMUNODEFICIENCY VIRUS
GAKALTDIV

SEQ ID NO: 6641 - protein, 9 aa, HUMAN IMMUNODEFICIENCY VIRUS
WTEYWQATW

SEQ ID NO: 6642 - protein, 10 aa, HUMAN IMMUNODEFICIENCY VIRUS
WTEYWQATWI

SEQ ID NO: 6643 - protein, 11 aa, HUMAN IMMUNODEFICIENCY VIRUS
PTPVNIIGRNM

SEQ ID NO: 6644 - protein, 8 aa, HUMAN IMMUNODEFICIENCY VIRUS
GAKALTDI

SEQ ID NO: 6645 - protein, 8 aa, HUMAN IMMUNODEFICIENCY VIRUS
DSGSEVNI

SEQ ID NO: 6646 - protein, 9 aa, HUMAN IMMUNODEFICIENCY VIRUS
DSGSEVNIV

SEQ ID NO: 6647 - protein, 9 aa, HUMAN IMMUNODEFICIENCY VIRUS
ASDFNLPPV

SEQ ID NO: 6648 - protein, 10 aa, HUMAN IMMUNODEFICIENCY VIRUS
LALQDSGSEV

SEQ ID NO: 6649 - protein, 10 aa, HUMAN IMMUNODEFICIENCY VIRUS
SSGIRKVLFL

SEQ ID NO: 6650 - protein, 10 aa, HUMAN IMMUNODEFICIENCY VIRUS
MASDFNLPPV

SEQ ID NO: 6651 - protein, 10 aa, HUMAN IMMUNODEFICIENCY VIRUS
ASDFNLPPVV

SEQ ID NO: 6652 - protein, 11 aa, HUMAN IMMUNODEFICIENCY VIRUS
LTETTNQKTEL

SEQ ID NO: 6653 - protein, 11 aa, HUMAN IMMUNODEFICIENCY VIRUS
VSSGIRKVLFL

SEQ ID NO: 6654 - protein, 11 aa, HUMAN IMMUNODEFICIENCY VIRUS
MASDFNLPPVV

SEQ ID NO: 6655 - protein, 10 aa, HUMAN IMMUNODEFICIENCY VIRUS
ASQIYAGIKV

SEQ ID NO: 6656 - protein, 8 aa, HUMAN IMMUNODEFICIENCY VIRUS
VSSGIRKV

SEQ ID NO: 6657 - protein, 8 aa, HUMAN IMMUNODEFICIENCY VIRUS
SSGIRKVL

SEQ ID NO: 6658 - protein, 8 aa, HUMAN IMMUNODEFICIENCY VIRUS
CTHLEGKV

SEQ ID NO: 6659 - protein, 9 aa, HUMAN IMMUNODEFICIENCY VIRUS
PSKDLIAEI

SEQ ID NO: 6660 - protein, 9 aa, HUMAN IMMUNODEFICIENCY VIRUS
DTTNQKTEL

SEQ ID NO: 6661 - protein, 9 aa, HUMAN IMMUNODEFICIENCY VIRUS
VSSGIRKVL

SEQ ID NO: 6662 - protein, 9 aa, HUMAN IMMUNODEFICIENCY VIRUS
SSGIRKVLF

SEQ ID NO: 6663 - protein, 9 aa, HUMAN IMMUNODEFICIENCY VIRUS
CTHLEGKVI

SEQ ID NO: 6664 - protein, 9 aa, HUMAN IMMUNODEFICIENCY VIRUS
GSNFTSAAV

SEQ ID NO: 6665 - protein, 10 aa, HUMAN IMMUNODEFICIENCY VIRUS
VSSGIRKVLF

SEQ ID NO: 6666 - protein, 10 aa, HUMAN IMMUNODEFICIENCY VIRUS
ETGQETAYFL

SEQ ID NO: 6667 - protein, 11 aa, HUMAN IMMUNODEFICIENCY VIRUS
PTPVNIIGRNL

SEQ ID NO: 6668 - protein, 11 aa, HUMAN IMMUNODEFICIENCY VIRUS
WASQIYAGIKV

SEQ ID NO: 6669 - protein, 11 aa, HUMAN IMMUNODEFICIENCY VIRUS
ETGQETAYFLL

SEQ ID NO: 6670 - protein, 8 aa, HUMAN IMMUNODEFICIENCY VIRUS
ASQIYAGI

SEQ ID NO: 6671 - protein, 9 aa, HUMAN IMMUNODEFICIENCY VIRUS
KAQEEHEKY

SEQ ID NO: 6672 - protein, 10 aa, HUMAN IMMUNODEFICIENCY VIRUS
ASQIYPGIKV

SEQ ID NO: 6673 - protein, 8 aa, HUMAN IMMUNODEFICIENCY VIRUS
LALQDSGL

SEQ ID NO: 6674 - protein, 8 aa, HUMAN IMMUNODEFICIENCY VIRUS
ESELVNQI

SEQ ID NO: 6675 - protein, 8 aa, HUMAN IMMUNODEFICIENCY VIRUS
TAYFLLKL

SEQ ID NO: 6676 - protein, 9 aa, HUMAN IMMUNODEFICIENCY VIRUS
WASQIYAGI

SEQ ID NO: 6677 - protein, 9 aa, HUMAN IMMUNODEFICIENCY VIRUS
ESELVNQII

SEQ ID NO: 6678 - protein, 9 aa, HUMAN IMMUNODEFICIENCY VIRUS
ETAYFLLKL

SEQ ID NO: 6679 - protein, 10 aa, HUMAN IMMUNODEFICIENCY VIRUS
CTEMEKEGKI

SEQ ID NO: 6680 - protein, 10 aa, HUMAN IMMUNODEFICIENCY VIRUS
LALQDSGLEV

SEQ ID NO: 6681 - protein, 10 aa, HUMAN IMMUNODEFICIENCY VIRUS
TSAAVKAACW

SEQ ID NO: 6682 - protein, 11 aa, HUMAN IMMUNODEFICIENCY VIRUS
WASQIYPGIKV

SEQ ID NO: 6683 - protein, 11 aa, HUMAN IMMUNODEFICIENCY VIRUS
FTSAAVKAACW

SEQ ID NO: 6684 - protein, 11 aa, HUMAN IMMUNODEFICIENCY VIRUS
TSAAVKAACWW

SEQ ID NO: 6685 - protein, 8 aa, HUMAN IMMUNODEFICIENCY VIRUS
WTVQPIQL

SEQ ID NO: 6686 - protein, 8 aa, HUMAN IMMUNODEFICIENCY VIRUS
DSGLEVNI

SEQ ID NO: 6687 - protein, 8 aa, HUMAN IMMUNODEFICIENCY VIRUS
AAVKAACW

SEQ ID NO: 6688 - protein, 9 aa, HUMAN IMMUNODEFICIENCY VIRUS
DSGLEVNIV

SEQ ID NO: 6689 - protein, 9 aa, HUMAN IMMUNODEFICIENCY VIRUS
SAAVKAACW

SEQ ID NO: 6690 - protein, 9 aa, HUMAN IMMUNODEFICIENCY VIRUS
AAVKAACWW

SEQ ID NO: 6691 - protein, 10 aa, HUMAN IMMUNODEFICIENCY VIRUS
VTDRGRQKVV

SEQ ID NO: 6692 - protein, 10 aa, HUMAN IMMUNODEFICIENCY VIRUS
SAAVKAACWW

SEQ ID NO: 6693 - protein, 8 aa, HUMAN IMMUNODEFICIENCY VIRUS
ASQIYPGI

SEQ ID NO: 6694 - protein, 9 aa, HUMAN IMMUNODEFICIENCY VIRUS
WASQIYPGI

SEQ ID NO: 6695 - protein, 9 aa, HUMAN IMMUNODEFICIENCY VIRUS
KTPKFRLPI

SEQ ID NO: 6696 - protein, 9 aa, HUMAN IMMUNODEFICIENCY VIRUS
ETTNQKTEL

SEQ ID NO: 6697 - protein, 8 aa, HUMAN IMMUNODEFICIENCY VIRUS
AANRETKL

SEQ ID NO: 6698 - protein, 9 aa, HUMAN IMMUNODEFICIENCY VIRUS
GAANRETKL

SEQ ID NO: 6699 - protein, 9 aa, HUMAN IMMUNODEFICIENCY VIRUS
VTDRGRQKV

SEQ ID NO: 6700 - protein, 9 aa, HUMAN IMMUNODEFICIENCY VIRUS
LAGRWPVKV

SEQ ID NO: 6701 - protein, 9 aa, HUMAN IMMUNODEFICIENCY VIRUS
KAACWWAGI

SEQ ID NO: 6702 - protein, 9 aa, HUMAN IMMUNODEFICIENCY VIRUS
ETAYFILKL

SEQ ID NO: 6703 - protein, 10 aa, HUMAN IMMUNODEFICIENCY VIRUS
PSINNETPGI

SEQ ID NO: 6704 - protein, 10 aa, HUMAN IMMUNODEFICIENCY VIRUS
CTHLEGKIIL

SEQ ID NO: 6705 - protein, 10 aa, HUMAN IMMUNODEFICIENCY VIRUS
ETGQETAYFI

SEQ ID NO: 6706 - protein, 11 aa, HUMAN IMMUNODEFICIENCY VIRUS
CTHLEGKIILV

SEQ ID NO: 6707 - protein, 11 aa, HUMAN IMMUNODEFICIENCY VIRUS
ETGQETAYFIL

SEQ ID NO: 6708 - protein, 8 aa, HUMAN IMMUNODEFICIENCY VIRUS
TAYFILKL

SEQ ID NO: 6709 - protein, 8 aa, HUMAN IMMUNODEFICIENCY VIRUS
AACWWAGI

SEQ ID NO: 6710 - protein, 11 aa, HUMAN IMMUNODEFICIENCY VIRUS
HSNWRAMASDF

SEQ ID NO: 6711 - protein, 10 aa, HUMAN IMMUNODEFICIENCY VIRUS
SSMTKILEPF

SEQ ID NO: 6712 - protein, 11 aa, HUMAN IMMUNODEFICIENCY VIRUS
QSSMTKILEPF

SEQ ID NO: 6713 - protein, 8 aa, HUMAN IMMUNODEFICIENCY VIRUS
LTEAVQKI

SEQ ID NO: 6714 - protein, 8 aa, HUMAN IMMUNODEFICIENCY VIRUS
CTHLEGKI

SEQ ID NO: 6715 - protein, 9 aa, HUMAN IMMUNODEFICIENCY VIRUS
ETKLGKAGY

SEQ ID NO: 6716 - protein, 9 aa, HUMAN IMMUNODEFICIENCY VIRUS
CTHLEGKII

SEQ ID NO: 6717 - protein, 9 aa, HUMAN IMMUNODEFICIENCY VIRUS
ATDIQTKEL

SEQ ID NO: 6718 - protein, 10 aa, HUMAN IMMUNODEFICIENCY VIRUS
ETKLGKAGYV

SEQ ID NO: 6719 - protein, 10 aa, HUMAN IMMUNODEFICIENCY VIRUS
IATDIQTKEL

SEQ ID NO: 6720 - protein, 9 aa, HUMAN IMMUNODEFICIENCY VIRUS
ITKIQNFRV

SEQ ID NO: 6721 - protein, 10 aa, HUMAN IMMUNODEFICIENCY VIRUS
ITKIQNFRVY

SEQ ID NO: 6722 - protein, 11 aa, HUMAN IMMUNODEFICIENCY VIRUS
ITKIQNFRVYY

SEQ ID NO: 6723 - protein, 11 aa, HUMAN IMMUNODEFICIENCY VIRUS
PAIFQSSMTKI

SEQ ID NO: 6724 - protein, 11 aa, HUMAN IMMUNODEFICIENCY VIRUS
QAQPDKSESEL

SEQ ID NO: 6725 - protein, 8 aa, HUMAN IMMUNODEFICIENCY VIRUS
TAFTIPSI

SEQ ID NO: 6726 - protein, 9 aa, HUMAN IMMUNODEFICIENCY VIRUS
YTAFTIPSI

SEQ ID NO: 6727 - protein, 9 aa, HUMAN IMMUNODEFICIENCY VIRUS
LTEEAELEL

SEQ ID NO: 6728 - protein, 10 aa, HUMAN IMMUNODEFICIENCY VIRUS
LSWVPAHKGI

SEQ ID NO: 6729 - protein, 11 aa, HUMAN IMMUNODEFICIENCY VIRUS
GAVVIQDNSDI

SEQ ID NO: 6730 - protein, 8 aa, HUMAN IMMUNODEFICIENCY VIRUS
QSSMTKIL

SEQ ID NO: 6731 - protein, 8 aa, HUMAN IMMUNODEFICIENCY VIRUS
KAKIIRDY

SEQ ID NO: 6732 - protein, 9 aa, HUMAN IMMUNODEFICIENCY VIRUS
RAMASDFNL

SEQ ID NO: 6733 - protein, 9 aa, HUMAN IMMUNODEFICIENCY VIRUS
SAGERIIDI

SEQ ID NO: 6734 - protein, 10 aa, HUMAN IMMUNODEFICIENCY VIRUS
LTQIGCTLNF

SEQ ID NO: 6735 - protein, 10 aa, HUMAN IMMUNODEFICIENCY VIRUS
YSAGERIIDI

SEQ ID NO: 6736 - protein, 10 aa, HUMAN IMMUNODEFICIENCY VIRUS
SAGERIIDII

SEQ ID NO: 6737 - protein, 11 aa, HUMAN IMMUNODEFICIENCY VIRUS
YSAGERIIDII

SEQ ID NO: 6738 - protein, 8 aa, HUMAN IMMUNODEFICIENCY VIRUS
LTQIGCTL

SEQ ID NO: 6739 - protein, 8 aa, HUMAN IMMUNODEFICIENCY VIRUS
PAIFQSSM

SEQ ID NO: 6740 - protein, 8 aa, HUMAN IMMUNODEFICIENCY VIRUS
YSAGERII

SEQ ID NO: 6741 - protein, 10 aa, HUMAN IMMUNODEFICIENCY VIRUS
ISKIGPENPY

SEQ ID NO: 6742 - protein, 10 aa, HUMAN IMMUNODEFICIENCY VIRUS
GSPAIFQSSM

SEQ ID NO: 6743 - protein, 10 aa, HUMAN IMMUNODEFICIENCY VIRUS
WTYQIYQEPF

SEQ ID NO: 6744 - protein, 11 aa, HUMAN IMMUNODEFICIENCY VIRUS
TTNQKTELQAI

SEQ ID NO: 6745 - protein, 8 aa, HUMAN IMMUNODEFICIENCY VIRUS
DSWTVNDI

SEQ ID NO: 6746 - protein, 8 aa, HUMAN IMMUNODEFICIENCY VIRUS
ASCDKCQL

SEQ ID NO: 6747 - protein, 9 aa, HUMAN IMMUNODEFICIENCY VIRUS
VASCDKCQL

SEQ ID NO: 6748 - protein, 11 aa, HUMAN IMMUNODEFICIENCY VIRUS
DSWTVNDIQKL

SEQ ID NO: 6749 - protein, 8 aa, HUMAN IMMUNODEFICIENCY VIRUS
MTKILEPF

SEQ ID NO: 6750 - protein, 9 aa, HUMAN IMMUNODEFICIENCY VIRUS
QTKELQKQI

SEQ ID NO: 6751 - protein, 8 aa, HUMAN IMMUNODEFICIENCY VIRUS
ITLWQRPL

SEQ ID NO: 6752 - protein, 9 aa, HUMAN IMMUNODEFICIENCY VIRUS
ITLWQRPLV

SEQ ID NO: 6753 - protein, 8 aa, HUMAN IMMUNODEFICIENCY VIRUS
KAIGTVLV

SEQ ID NO: 6754 - protein, 8 aa, HUMAN IMMUNODEFICIENCY VIRUS
HTNDVKQL

SEQ ID NO: 6755 - protein, 10 aa, HUMAN IMMUNODEFICIENCY VIRUS
PAGLKKKKSV

SEQ ID NO: 6756 - protein, 11 aa, HUMAN IMMUNODEFICIENCY VIRUS
QATWIPEWEFV

SEQ ID NO: 6757 - protein, 8 aa, HUMAN IMMUNODEFICIENCY VIRUS
KSVTVLDV

SEQ ID NO: 6758 - protein, 8 aa, HUMAN IMMUNODEFICIENCY VIRUS
HTDNGSNF

SEQ ID NO: 6759 - protein, 10 aa, HUMAN IMMUNODEFICIENCY VIRUS
ATWIPEWEFV

SEQ ID NO: 6760 - protein, 11 aa, HUMAN IMMUNODEFICIENCY VIRUS
ETVPVKLKPGM

SEQ ID NO: 6761 - protein, 11 aa, HUMAN IMMUNODEFICIENCY VIRUS
ETPGIRYQYNV

SEQ ID NO: 6762 - protein, 10 aa, HUMAN IMMUNODEFICIENCY VIRUS
QATWIPEWEF

SEQ ID NO: 6763 - protein, 9 aa, HUMAN IMMUNODEFICIENCY VIRUS
ETPGIRYQY

SEQ ID NO: 6764 - protein, 9 aa, HUMAN IMMUNODEFICIENCY VIRUS
ATWIPEWEF

SEQ ID NO: 6765 - protein, 10 aa, HUMAN IMMUNODEFICIENCY VIRUS
VASGYIEAEV

SEQ ID NO: 6766 - protein, 11 aa, HUMAN IMMUNODEFICIENCY VIRUS
VASGYIEAEVI

SEQ ID NO: 6767 - protein, 9 aa, HUMAN IMMUNODEFICIENCY VIRUS
ASGYIEAEV

SEQ ID NO: 6768 - protein, 9 aa, HUMAN IMMUNODEFICIENCY VIRUS
QSQGVVESM

SEQ ID NO: 6769 - protein, 10 aa, HUMAN IMMUNODEFICIENCY VIRUS
GTVLVGPTPV

SEQ ID NO: 6770 - protein, 10 aa, HUMAN IMMUNODEFICIENCY VIRUS
RTQDFWEVQL

SEQ ID NO: 6771 - protein, 10 aa, HUMAN IMMUNODEFICIENCY VIRUS
VAVHVASGYI

SEQ ID NO: 6772 - protein, 10 aa, HUMAN IMMUNODEFICIENCY VIRUS
ASGYIEAEVI

SEQ ID NO: 6773 - protein, 10 aa, HUMAN IMMUNODEFICIENCY VIRUS
ESMNKELKKI

SEQ ID NO: 6774 - protein, 11 aa, HUMAN IMMUNODEFICIENCY VIRUS
ISPIETVPVKL

SEQ ID NO: 6775 - protein, 11 aa, HUMAN IMMUNODEFICIENCY VIRUS
ESMNKELKKII

SEQ ID NO: 6776 - protein, 8 aa, HUMAN IMMUNODEFICIENCY VIRUS
QATWIPEW

SEQ ID NO: 6777 - protein, 8 aa, HUMAN IMMUNODEFICIENCY VIRUS
RTQDFWEV

SEQ ID NO: 6778 - protein, 8 aa, HUMAN IMMUNODEFICIENCY VIRUS
DAYFSVPL

SEQ ID NO: 6779 - protein, 8 aa, HUMAN IMMUNODEFICIENCY VIRUS
TTNQKTEL

SEQ ID NO: 6780 - protein, 9 aa, HUMAN IMMUNODEFICIENCY VIRUS
ISPIETVPV

SEQ ID NO: 6781 - protein, 9 aa, HUMAN IMMUNODEFICIENCY VIRUS
LTEEKIKAL

SEQ ID NO: 6782 - protein, 10 aa, HUMAN IMMUNODEFICIENCY VIRUS
VTVLDVGDAY

SEQ ID NO: 6783 - protein, 10 aa, HUMAN IMMUNODEFICIENCY VIRUS
KTAVQMAVFI

SEQ ID NO: 6784 - protein, 11 aa, HUMAN IMMUNODEFICIENCY VIRUS
VTVLDVGDAYF

SEQ ID NO: 6785 - protein, 11 aa, HUMAN IMMUNODEFICIENCY VIRUS
PAETGQETAYF

SEQ ID NO: 6786 - protein, 8 aa, HUMAN IMMUNODEFICIENCY VIRUS
LAENREIL

SEQ ID NO: 6787 - protein, 8 aa, HUMAN IMMUNODEFICIENCY VIRUS
NTPPLVKL

SEQ ID NO: 6788 - protein, 8 aa, HUMAN IMMUNODEFICIENCY VIRUS
CSPGIWQL

SEQ ID NO: 6789 - protein, 8 aa, HUMAN IMMUNODEFICIENCY VIRUS
KTAVQMAV

SEQ ID NO: 6790 - protein, 9 aa, HUMAN IMMUNODEFICIENCY VIRUS
NTPPLVKLW

SEQ ID NO: 6791 - protein, 9 aa, HUMAN IMMUNODEFICIENCY VIRUS
ETGQETAYF

SEQ ID NO: 6792 - protein, 9 aa, HUMAN IMMUNODEFICIENCY VIRUS
KTAVQMAVF

SEQ ID NO: 6793 - protein, 10 aa, HUMAN IMMUNODEFICIENCY VIRUS
NTPPLVKLWY

SEQ ID NO: 6794 - protein, 11 aa, HUMAN IMMUNODEFICIENCY VIRUS
FAIKKKDSTKW

SEQ ID NO: 6795 - protein, 11 aa, HUMAN IMMUNODEFICIENCY VIRUS
QAEHLKTAVQM

SEQ ID NO: 6796 - protein, 10 aa, HUMAN IMMUNODEFICIENCY VIRUS
STKWRKLVDF

SEQ ID NO: 6797 - protein, 10 aa, HUMAN IMMUNODEFICIENCY VIRUS
VTDSQYALGI

SEQ ID NO: 6798 - protein, 10 aa, HUMAN IMMUNODEFICIENCY VIRUS
PAETGQETAY

SEQ ID NO: 6799 - protein, 11 aa, HUMAN IMMUNODEFICIENCY VIRUS
DSTKWRKLVDF

SEQ ID NO: 6800 - protein, 11 aa, HUMAN IMMUNODEFICIENCY VIRUS
VTDSQYALGII

SEQ ID NO: 6801 - protein, 8 aa, HUMAN IMMUNODEFICIENCY VIRUS
DSTKWRKL

SEQ ID NO: 6802 - protein, 8 aa, HUMAN IMMUNODEFICIENCY VIRUS
STKWRKLV

SEQ ID NO: 6803 - protein, 8 aa, HUMAN IMMUNODEFICIENCY VIRUS
VTDSQYAL

SEQ ID NO: 6804 - protein, 8 aa, HUMAN IMMUNODEFICIENCY VIRUS
DSQYALGI

SEQ ID NO: 6805 - protein, 8 aa, HUMAN IMMUNODEFICIENCY VIRUS
ETGQETAY

SEQ ID NO: 6806 - protein, 9 aa, HUMAN IMMUNODEFICIENCY VIRUS
DSTKWRKLV

SEQ ID NO: 6807 - protein, 9 aa, HUMAN IMMUNODEFICIENCY VIRUS
DSQYALGII

SEQ ID NO: 6808 - protein, 9 aa, HUMAN IMMUNODEFICIENCY VIRUS
VAVHVASGY

SEQ ID NO: 6809 - protein, 9 aa, HUMAN IMMUNODEFICIENCY VIRUS
QAEHLKTAV

SEQ ID NO: 6810 - protein, 9 aa, HUMAN IMMUNODEFICIENCY VIRUS
TAVQMAVFI

SEQ ID NO: 6811 - protein, 8 aa, HUMAN IMMUNODEFICIENCY VIRUS
MAVFIHNF

SEQ ID NO: 6812 - protein, 10 aa, HUMAN IMMUNODEFICIENCY VIRUS
CTLNFPISPI

SEQ ID NO: 6813 - protein, 8 aa, HUMAN IMMUNODEFICIENCY VIRUS
TAVQMAVF

SEQ ID NO: 6814 - protein, 9 aa, HUMAN IMMUNODEFICIENCY VIRUS
DTGADDTVL

SEQ ID NO: 6815 - protein, 10 aa, HUMAN IMMUNODEFICIENCY VIRUS
WTVNDIQKLV

SEQ ID NO: 6816 - protein, 9 aa, HUMAN IMMUNODEFICIENCY VIRUS
WTVNDIQKL

SEQ ID NO: 6817 - protein, 8 aa, HUMAN IMMUNODEFICIENCY VIRUS
DTGADDTV

SEQ ID NO: 6818 - protein, 10 aa, HUMAN IMMUNODEFICIENCY VIRUS
RARQRQIHSI

SEQ ID NO: 6819 - protein, 10 aa, HUMAN IMMUNODEFICIENCY VIRUS
GTQGVGSPQI

SEQ ID NO: 6820 - protein, 8 aa, HUMAN IMMUNODEFICIENCY VIRUS
RSAEPVPL

SEQ ID NO: 6821 - protein, 9 aa, HUMAN IMMUNODEFICIENCY VIRUS
SAEPVPLQL

SEQ ID NO: 6822 - protein, 10 aa, HUMAN IMMUNODEFICIENCY VIRUS
RSAEPVPLQL

SEQ ID NO: 6823 - protein, 10 aa, HUMAN IMMUNODEFICIENCY VIRUS
RSGDSDEELL

SEQ ID NO: 6824 - protein, 10 aa, HUMAN IMMUNODEFICIENCY VIRUS
QARKNRRRRW

SEQ ID NO: 6825 - protein, 9 aa, HUMAN IMMUNODEFICIENCY VIRUS
RSGDSDEEL

SEQ ID NO: 6826 - protein, 8 aa, HUMAN IMMUNODEFICIENCY VIRUS
GTSGTQGV

SEQ ID NO: 6827 - protein, 9 aa, HUMAN IMMUNODEFICIENCY VIRUS
PAEPVPLQL

SEQ ID NO: 6828 - protein, 10 aa, HUMAN IMMUNODEFICIENCY VIRUS
QARRNRRRRW

SEQ ID NO: 6829 - protein, 11 aa, HUMAN IMMUNODEFICIENCY VIRUS
PTGPKESKKKV

SEQ ID NO: 6830 - protein, 8 aa, HUMAN IMMUNODEFICIENCY VIRUS
KSLVKYHM

SEQ ID NO: 6831 - protein, 10 aa, HUMAN IMMUNODEFICIENCY VIRUS
FSDSAIRKAI

SEQ ID NO: 6832 - protein, 9 aa, HUMAN IMMUNODEFICIENCY VIRUS
YSTQIDPDL

SEQ ID NO: 6833 - protein, 9 aa, HUMAN IMMUNODEFICIENCY VIRUS
YSTQVDPGL

SEQ ID NO: 6834 - protein, 8 aa, HUMAN IMMUNODEFICIENCY VIRUS
STQVDPGL

SEQ ID NO: 6835 - protein, 10 aa, HUMAN IMMUNODEFICIENCY VIRUS
KSLVKHHMYI

SEQ ID NO: 6836 - protein, 10 aa, HUMAN IMMUNODEFICIENCY VIRUS
VSIEWRLRRY

SEQ ID NO: 6837 - protein, 11 aa, HUMAN IMMUNODEFICIENCY VIRUS
FSESAIRKAIL

SEQ ID NO: 6838 - protein, 11 aa, HUMAN IMMUNODEFICIENCY VIRUS
GSLQYLALKAL

SEQ ID NO: 6839 - protein, 8 aa, HUMAN IMMUNODEFICIENCY VIRUS
STQIDPDL

SEQ ID NO: 6840 - protein, 8 aa, HUMAN IMMUNODEFICIENCY VIRUS
ESAIRNAI

SEQ ID NO: 6841 - protein, 8 aa, HUMAN IMMUNODEFICIENCY VIRUS
SAIRNAIL

SEQ ID NO: 6842 - protein, 9 aa, HUMAN IMMUNODEFICIENCY VIRUS
QTGERDWHL

SEQ ID NO: 6843 - protein, 9 aa, HUMAN IMMUNODEFICIENCY VIRUS
ESAIRNAIL

SEQ ID NO: 6844 - protein, 9 aa, HUMAN IMMUNODEFICIENCY VIRUS
KTKPPLPSV

SEQ ID NO: 6845 - protein, 10 aa, HUMAN IMMUNODEFICIENCY VIRUS
FSESAIRKAI

SEQ ID NO: 6846 - protein, 10 aa, HUMAN IMMUNODEFICIENCY VIRUS
FSESAIRNAI

SEQ ID NO: 6847 - protein, 11 aa, HUMAN IMMUNODEFICIENCY VIRUS
FSESAIRNAIL

SEQ ID NO: 6848 - protein, 11 aa, HUMAN IMMUNODEFICIENCY VIRUS
GSLQYLALAAL

SEQ ID NO: 6849 - protein, 10 aa, HUMAN IMMUNODEFICIENCY VIRUS
LADQLIHMHY

SEQ ID NO: 6850 - protein, 11 aa, HUMAN IMMUNODEFICIENCY VIRUS
ESRHPKVSSEV

SEQ ID NO: 6851 - protein, 11 aa, HUMAN IMMUNODEFICIENCY VIRUS
LADQLIHMHYF

SEQ ID NO: 6852 - protein, 11 aa, HUMAN IMMUNODEFICIENCY VIRUS
PSVKKLTEDRW

SEQ ID NO: 6853 - protein, 10 aa, HUMAN IMMUNODEFICIENCY VIRUS
NSLVKHHMYV

SEQ ID NO: 6854 - protein, 10 aa, HUMAN IMMUNODEFICIENCY VIRUS
LADQLIHLYY

SEQ ID NO: 6855 - protein, 11 aa, HUMAN IMMUNODEFICIENCY VIRUS
RTWKSLVKHHM

SEQ ID NO: 6856 - protein, 11 aa, HUMAN IMMUNODEFICIENCY VIRUS
LADQLIHLYYF

SEQ ID NO: 6857 - protein, 9 aa, HUMAN IMMUNODEFICIENCY VIRUS
LADQLIHLY

SEQ ID NO: 6858 - protein, 11 aa, HUMAN IMMUNODEFICIENCY VIRUS
KTKGHRGSHTM

SEQ ID NO: 6859 - protein, 9 aa, HUMAN IMMUNODEFICIENCY VIRUS
ESAIRKAIL

SEQ ID NO: 6860 - protein, 8 aa, HUMAN IMMUNODEFICIENCY VIRUS
LADQLIHM

SEQ ID NO: 6861 - protein, 8 aa, HUMAN IMMUNODEFICIENCY VIRUS
ESAIRKAI

SEQ ID NO: 6862 - protein, 8 aa, HUMAN IMMUNODEFICIENCY VIRUS
KSLVKHHM

SEQ ID NO: 6863 - protein, 9 aa, HUMAN IMMUNODEFICIENCY VIRUS
KSLVKHHMY

SEQ ID NO: 6864 - protein, 9 aa, HUMAN IMMUNODEFICIENCY VIRUS
DSAIRKAIL

SEQ ID NO: 6865 - protein, 8 aa, HUMAN IMMUNODEFICIENCY VIRUS
DSAIRKAI

SEQ ID NO: 6866 - protein, 9 aa, HUMAN IMMUNODEFICIENCY VIRUS
HTGERDWHL

SEQ ID NO: 6867 - protein, 9 aa, HUMAN IMMUNODEFICIENCY VIRUS
NSLVKHHMY

SEQ ID NO: 6868 - protein, 11 aa, HUMAN IMMUNODEFICIENCY VIRUS
RTWNSLVKHHM

SEQ ID NO: 6869 - protein, 8 aa, HUMAN IMMUNODEFICIENCY VIRUS
LADQLIHL

SEQ ID NO: 6870 - protein, 8 aa, HUMAN IMMUNODEFICIENCY VIRUS
NSLVKHHM

SEQ ID NO: 6871 - protein, 9 aa, HUMAN IMMUNODEFICIENCY VIRUS
ISSEVHIPL

SEQ ID NO: 6872 - protein, 9 aa, HUMAN IMMUNODEFICIENCY VIRUS
VSSEVHIPL

SEQ ID NO: 6873 - protein, 11 aa, HUMAN IMMUNODEFICIENCY VIRUS
GSLQYLALTAL

SEQ ID NO: 6874 - protein, 8 aa, HUMAN IMMUNODEFICIENCY VIRUS
SAIRKAIL

SEQ ID NO: 6875 - protein, 10 aa, HUMAN IMMUNODEFICIENCY VIRUS
QAGHNKVGSL

SEQ ID NO: 6876 - protein, 8 aa, HUMAN IMMUNODEFICIENCY VIRUS
SSEVHIPL

SEQ ID NO: 6877 - protein, 8 aa, HUMAN IMMUNODEFICIENCY VIRUS
GSLQYLAL

SEQ ID NO: 6878 - protein, 9 aa, HUMAN IMMUNODEFICIENCY VIRUS
WALELLEEL

SEQ ID NO: 6879 - protein, 10 aa, HUMAN IMMUNODEFICIENCY VIRUS
ETYGDTWTGV

SEQ ID NO: 6880 - protein, 9 aa, HUMAN IMMUNODEFICIENCY VIRUS
EAVRHFPRI

SEQ ID NO: 6881 - protein, 10 aa, HUMAN IMMUNODEFICIENCY VIRUS
EAVRHFPRIW

SEQ ID NO: 6882 - protein, 11 aa, HUMAN IMMUNODEFICIENCY VIRUS
EAVRHFPRIWL

SEQ ID NO: 6883 - protein, 8 aa, HUMAN IMMUNODEFICIENCY VIRUS
KSEAVRHF

SEQ ID NO: 6884 - protein, 10 aa, HUMAN IMMUNODEFICIENCY VIRUS
WAGVEAIIRI

SEQ ID NO: 6885 - protein, 11 aa, HUMAN IMMUNODEFICIENCY VIRUS
WAGVEAIIRIL

SEQ ID NO: 6886 - protein, 8 aa, HUMAN IMMUNODEFICIENCY VIRUS
WAGVEAII

SEQ ID NO: 6887 - protein, 9 aa, HUMAN IMMUNODEFICIENCY VIRUS
DTWAGVEAI

SEQ ID NO: 6888 - protein, 10 aa, HUMAN IMMUNODEFICIENCY VIRUS
ETYGDTWAGV

SEQ ID NO: 6889 - protein, 10 aa, HUMAN IMMUNODEFICIENCY VIRUS
NTYGDTWEGV

SEQ ID NO: 6890 - protein, 10 aa, HUMAN IMMUNODEFICIENCY VIRUS
DTWAGVEAII

SEQ ID NO: 6891 - protein, 10 aa, HUMAN IMMUNODEFICIENCY VIRUS
DTWEGVEAII

SEQ ID NO: 6892 - protein, 9 aa, HUMAN IMMUNODEFICIENCY VIRUS
DTWEGVEAI

SEQ ID NO: 6893 - protein, 10 aa, HUMAN IMMUNODEFICIENCY VIRUS
EAIIRILQQL

SEQ ID NO: 6894 - protein, 11 aa, HUMAN IMMUNODEFICIENCY VIRUS
EAIIRILQQLL

SEQ ID NO: 6895 - protein, 10 aa, HUMAN IMMUNODEFICIENCY VIRUS
EAVRHFPRPW

SEQ ID NO: 6896 - protein, 11 aa, HUMAN IMMUNODEFICIENCY VIRUS
EAVRHFPRPWL

SEQ ID NO: 6897 - protein, 9 aa, HUMAN IMMUNODEFICIENCY VIRUS
WTLELLEEL

SEQ ID NO: 6898 - protein, 8 aa, HUMAN IMMUNODEFICIENCY VIRUS
LAKVDYRI

SEQ ID NO: 6899 - protein, 8 aa, HUMAN IMMUNODEFICIENCY VIRUS
LAKVDYRL

SEQ ID NO: 6900 - protein, 9 aa, HUMAN IMMUNODEFICIENCY VIRUS
LAKVDYRIV

SEQ ID NO: 6901 - protein, 10 aa, HUMAN IMMUNODEFICIENCY VIRUS
LAKVDYRIVI

SEQ ID NO: 6902 - protein, 10 aa, HUMAN IMMUNODEFICIENCY VIRUS
LAKVDYRLGV

SEQ ID NO: 6903 - protein, 11 aa, HUMAN IMMUNODEFICIENCY VIRUS
LAKVDYRIVIV

SEQ ID NO: 6904 - protein, 9 aa, HUMAN IMMUNODEFICIENCY VIRUS
VTLLSSSKL

SEQ ID NO: 6905 - protein, 8 aa, HUMAN IMMUNODEFICIENCY VIRUS
LAIVALVV

SEQ ID NO: 6906 - protein, 8 aa, HUMAN IMMUNODEFICIENCY VIRUS
WTIVFIEY

SEQ ID NO: 6907 - protein, 9 aa, HUMAN IMMUNODEFICIENCY VIRUS
ESEGDQEEL

SEQ ID NO: 6908 - protein, 9 aa, HUMAN IMMUNODEFICIENCY VIRUS
ESEGDTEEL

SEQ ID NO: 6909 - protein, 9 aa, HUMAN IMMUNODEFICIENCY VIRUS
IAIVVWTIV

SEQ ID NO: 6910 - protein, 8 aa, HUMAN IMMUNODEFICIENCY VIRUS
IAIVVWTI

SEQ ID NO: 6911 - protein, 8 aa, HUMAN IMMUNODEFICIENCY VIRUS
GIGPGQTF

SEQ ID NO: 6912 - protein, 8 aa, HUMAN IMMUNODEFICIENCY VIRUS
SIGSGQAF

SEQ ID NO: 6913 - protein, 8 aa, HUMAN IMMUNODEFICIENCY VIRUS
KLREIRQF

SEQ ID NO: 6914 - protein, 8 aa, HUMAN IMMUNODEFICIENCY VIRUS
EPDRPERI

SEQ ID NO: 6915 - protein, 8 aa, HUMAN IMMUNODEFICIENCY VIRUS
PPDRPEGI

SEQ ID NO: 6916 - protein, 9 aa, HUMAN IMMUNODEFICIENCY VIRUS
GIGPGQTFY

SEQ ID NO: 6917 - protein, 9 aa, HUMAN IMMUNODEFICIENCY VIRUS
SIGSGQAFY

SEQ ID NO: 6918 - protein, 10 aa, HUMAN IMMUNODEFICIENCY VIRUS
SIGSGQAFYV

SEQ ID NO: 6919 - protein, 8 aa, HUMAN IMMUNODEFICIENCY VIRUS
KQLYATVY

SEQ ID NO: 6920 - protein, 10 aa, HUMAN IMMUNODEFICIENCY VIRUS
QLYATVYAGV

SEQ ID NO: 6921 - protein, 11 aa, HUMAN IMMUNODEFICIENCY VIRUS
KQLYATVYSGV

SEQ ID NO: 6922 - protein, 9 aa, HUMAN IMMUNODEFICIENCY VIRUS
TIGAMFLGF

SEQ ID NO: 6923 - protein, 9 aa, HUMAN IMMUNODEFICIENCY VIRUS
MLGAMFLGF

SEQ ID NO: 6924 - protein, 9 aa, HUMAN IMMUNODEFICIENCY VIRUS
SLRGLQRGW

SEQ ID NO: 6925 - protein, 11 aa, HUMAN IMMUNODEFICIENCY VIRUS
RLGWEGLKYLW

SEQ ID NO: 6926 - protein, 9 aa, HUMAN IMMUNODEFICIENCY VIRUS
RLGWEGLKY

SEQ ID NO: 6927 - protein, 11 aa, HUMAN IMMUNODEFICIENCY VIRUS
GLRLGWEGLKY

SEQ ID NO: 6928 - protein, 8 aa, HUMAN IMMUNODEFICIENCY VIRUS
LILGLVII

SEQ ID NO: 6929 - protein, 9 aa, HUMAN IMMUNODEFICIENCY VIRUS
IPRRIRQGF

SEQ ID NO: 6930 - protein, 8 aa, HUMAN IMMUNODEFICIENCY VIRUS
ALFYKLDV

SEQ ID NO: 6931 - protein, 8 aa, HUMAN IMMUNODEFICIENCY VIRUS
HMLQLTVW

SEQ ID NO: 6932 - protein, 8 aa, HUMAN IMMUNODEFICIENCY VIRUS
DITNWLWY

SEQ ID NO: 6933 - protein, 9 aa, HUMAN IMMUNODEFICIENCY VIRUS
DIRQAHCNV

SEQ ID NO: 6934 - protein, 9 aa, HUMAN IMMUNODEFICIENCY VIRUS
LPCRIKQIV

SEQ ID NO: 6935 - protein, 9 aa, HUMAN IMMUNODEFICIENCY VIRUS
MLQLTVWGI

SEQ ID NO: 6936 - protein, 9 aa, HUMAN IMMUNODEFICIENCY VIRUS
DITNWLWYI

SEQ ID NO: 6937 - protein, 9 aa, HUMAN IMMUNODEFICIENCY VIRUS
SQELKNSAV

SEQ ID NO: 6938 - protein, 10 aa, HUMAN IMMUNODEFICIENCY VIRUS
PIHYCTPAGF

SEQ ID NO: 6939 - protein, 10 aa, HUMAN IMMUNODEFICIENCY VIRUS
TLPCRIKQIV

SEQ ID NO: 6940 - protein, 11 aa, HUMAN IMMUNODEFICIENCY VIRUS
IPIHYCTPAGF

SEQ ID NO: 6941 - protein, 11 aa, HUMAN IMMUNODEFICIENCY VIRUS
RVGQAMYAPPI

SEQ ID NO: 6942 - protein, 11 aa, HUMAN IMMUNODEFICIENCY VIRUS
WMEWEREIDNY

SEQ ID NO: 6943 - protein, 11 aa, HUMAN IMMUNODEFICIENCY VIRUS
ALDKWASLWNW

SEQ ID NO: 6944 - protein, 9 aa, HUMAN IMMUNODEFICIENCY VIRUS
SLKGLRLGW

SEQ ID NO: 6945 - protein, 9 aa, HUMAN IMMUNODEFICIENCY VIRUS
GIGAVFLGF

SEQ ID NO: 6946 - protein, 8 aa, HUMAN IMMUNODEFICIENCY VIRUS
KLWVTVYY

SEQ ID NO: 6947 - protein, 8 aa, HUMAN IMMUNODEFICIENCY VIRUS
AVGIGAVF

SEQ ID NO: 6948 - protein, 10 aa, HUMAN IMMUNODEFICIENCY VIRUS
KLWVTVYYGV

SEQ ID NO: 6949 - protein, 11 aa, HUMAN IMMUNODEFICIENCY VIRUS
AVGIGAVFLGF

SEQ ID NO: 6950 - protein, 8 aa, HUMAN IMMUNODEFICIENCY VIRUS
RIGPGQTF

SEQ ID NO: 6951 - protein, 8 aa, HUMAN IMMUNODEFICIENCY VIRUS
NITLPCRI

SEQ ID NO: 6952 - protein, 8 aa, HUMAN IMMUNODEFICIENCY VIRUS
WQRVGQAM

SEQ ID NO: 6953 - protein, 8 aa, HUMAN IMMUNODEFICIENCY VIRUS
QIRCSSNI

SEQ ID NO: 6954 - protein, 9 aa, HUMAN IMMUNODEFICIENCY VIRUS
ALFYRLDVV

SEQ ID NO: 6955 - protein, 9 aa, HUMAN IMMUNODEFICIENCY VIRUS
GPCTNVSTV

SEQ ID NO: 6956 - protein, 9 aa, HUMAN IMMUNODEFICIENCY VIRUS
RIGPGQTFY

SEQ ID NO: 6957 - protein, 9 aa, HUMAN IMMUNODEFICIENCY VIRUS
WQRVGQAMY

SEQ ID NO: 6958 - protein, 9 aa, HUMAN IMMUNODEFICIENCY VIRUS
GQIRCSSNI

SEQ ID NO: 6959 - protein, 9 aa, HUMAN IMMUNODEFICIENCY VIRUS
ALDKWASLW

SEQ ID NO: 6960 - protein, 10 aa, HUMAN IMMUNODEFICIENCY VIRUS
AVSLLNATAI

SEQ ID NO: 6961 - protein, 11 aa, HUMAN IMMUNODEFICIENCY VIRUS
NITLPCRIKQI

SEQ ID NO: 6962 - protein, 11 aa, HUMAN IMMUNODEFICIENCY VIRUS
VVEREKRAVGI

SEQ ID NO: 6963 - protein, 11 aa, HUMAN IMMUNODEFICIENCY VIRUS
LLALDKWASLW

SEQ ID NO: 6964 - protein, 8 aa, HUMAN IMMUNODEFICIENCY VIRUS
NMWKNDMV

SEQ ID NO: 6965 - protein, 8 aa, HUMAN IMMUNODEFICIENCY VIRUS
ALFYRLDV

SEQ ID NO: 6966 - protein, 8 aa, HUMAN IMMUNODEFICIENCY VIRUS
RIKQIVNM

SEQ ID NO: 6967 - protein, 8 aa, HUMAN IMMUNODEFICIENCY VIRUS
KLICTTTV

SEQ ID NO: 6968 - protein, 8 aa, HUMAN IMMUNODEFICIENCY VIRUS
WMEWEREI

SEQ ID NO: 6969 - protein, 9 aa, HUMAN IMMUNODEFICIENCY VIRUS
ILKCNDKKF

SEQ ID NO: 6970 - protein, 9 aa, HUMAN IMMUNODEFICIENCY VIRUS
RIKQIVNMW

SEQ ID NO: 6971 - protein, 9 aa, HUMAN IMMUNODEFICIENCY VIRUS
LICTTTVPW

SEQ ID NO: 6972 - protein, 9 aa, HUMAN IMMUNODEFICIENCY VIRUS
GQELKNSAI

SEQ ID NO: 6973 - protein, 9 aa, HUMAN IMMUNODEFICIENCY VIRUS
AILHIPRRI

SEQ ID NO: 6974 - protein, 10 aa, HUMAN IMMUNODEFICIENCY VIRUS
AILKCNDKKF

SEQ ID NO: 6975 - protein, 10 aa, HUMAN IMMUNODEFICIENCY VIRUS
KLICTTTVPW

SEQ ID NO: 6976 - protein, 11 aa, HUMAN IMMUNODEFICIENCY VIRUS
NMTWMEWEREI

SEQ ID NO: 6977 - protein, 11 aa, HUMAN IMMUNODEFICIENCY VIRUS
IVGGLIGLRII

SEQ ID NO: 6978 - protein, 10 aa, HUMAN IMMUNODEFICIENCY VIRUS
ELYKYKVVEI

SEQ ID NO: 6979 - protein, 8 aa, HUMAN IMMUNODEFICIENCY VIRUS
DPNPQEVV

SEQ ID NO: 6980 - protein, 8 aa, HUMAN IMMUNODEFICIENCY VIRUS
HLLKLTVW

SEQ ID NO: 6981 - protein, 8 aa, HUMAN IMMUNODEFICIENCY VIRUS
NVPWNSSW

SEQ ID NO: 6982 - protein, 8 aa, HUMAN IMMUNODEFICIENCY VIRUS
EIWDNMTW

SEQ ID NO: 6983 - protein, 8 aa, HUMAN IMMUNODEFICIENCY VIRUS
SIRLVNGF

SEQ ID NO: 6984 - protein, 8 aa, HUMAN IMMUNODEFICIENCY VIRUS
SIRLVSGF

SEQ ID NO: 6985 - protein, 8 aa, HUMAN IMMUNODEFICIENCY VIRUS
RLRDLLLI

SEQ ID NO: 6986 - protein, 8 aa, HUMAN IMMUNODEFICIENCY VIRUS
ILHIPRRI

SEQ ID NO: 6987 - protein, 9 aa, HUMAN IMMUNODEFICIENCY VIRUS
EIKNCSFNI

SEQ ID NO: 6988 - protein, 9 aa, HUMAN IMMUNODEFICIENCY VIRUS
AITQACPKV

SEQ ID NO: 6989 - protein, 9 aa, HUMAN IMMUNODEFICIENCY VIRUS
SLAEEEVVI

SEQ ID NO: 6990 - protein, 9 aa, HUMAN IMMUNODEFICIENCY VIRUS
QQHLLKLTV

SEQ ID NO: 6991 - protein, 9 aa, HUMAN IMMUNODEFICIENCY VIRUS
LLKLTVWGI

SEQ ID NO: 6992 - protein, 10 aa, HUMAN IMMUNODEFICIENCY VIRUS
AQQHLLKLTV

SEQ ID NO: 6993 - protein, 10 aa, HUMAN IMMUNODEFICIENCY VIRUS
QQHLLKLTVW

SEQ ID NO: 6994 - protein, 10 aa, HUMAN IMMUNODEFICIENCY VIRUS
HLLKLTVWGI

SEQ ID NO: 6995 - protein, 10 aa, HUMAN IMMUNODEFICIENCY VIRUS
EQELLELDKW

SEQ ID NO: 6996 - protein, 11 aa, HUMAN IMMUNODEFICIENCY VIRUS
VPTDPNPQEVV

SEQ ID NO: 6997 - protein, 11 aa, HUMAN IMMUNODEFICIENCY VIRUS
VMHSFNCGGEF

SEQ ID NO: 6998 - protein, 11 aa, HUMAN IMMUNODEFICIENCY VIRUS
TITLPCRIKQI

SEQ ID NO: 6999 - protein, 11 aa, HUMAN IMMUNODEFICIENCY VIRUS
AQQHLLKLTVW

SEQ ID NO: 7000 - protein, 8 aa, HUMAN IMMUNODEFICIENCY VIRUS
SLAEEEVV

SEQ ID NO: 7001 - protein, 8 aa, HUMAN IMMUNODEFICIENCY VIRUS
TITLPCRI

SEQ ID NO: 7002 - protein, 8 aa, HUMAN IMMUNODEFICIENCY VIRUS
SLLNATAI

SEQ ID NO: 7003 - protein, 9 aa, HUMAN IMMUNODEFICIENCY VIRUS
DPEIVMHSF

SEQ ID NO: 7004 - protein, 9 aa, HUMAN IMMUNODEFICIENCY VIRUS
GQAMYAPPI

SEQ ID NO: 7005 - protein, 9 aa, HUMAN IMMUNODEFICIENCY VIRUS
RIIFAVLSI

SEQ ID NO: 7006 - protein, 9 aa, HUMAN IMMUNODEFICIENCY VIRUS
AVAEGTDRV

SEQ ID NO: 7007 - protein, 10 aa, HUMAN IMMUNODEFICIENCY VIRUS
EQDLLALDKW

SEQ ID NO: 7008 - protein, 10 aa, HUMAN IMMUNODEFICIENCY VIRUS
RIIFAVLSIV

SEQ ID NO: 7009 - protein, 10 aa, HUMAN IMMUNODEFICIENCY VIRUS
SLLNATAIAV

SEQ ID NO: 7010 - protein, 10 aa, HUMAN IMMUNODEFICIENCY VIRUS
AVAEGTDRVI

SEQ ID NO: 7011 - protein, 11 aa, HUMAN IMMUNODEFICIENCY VIRUS
VITQACPKVSF

SEQ ID NO: 7012 - protein, 11 aa, HUMAN IMMUNODEFICIENCY VIRUS
GLRIIFAVLSI

SEQ ID NO: 7013 - protein, 11 aa, HUMAN IMMUNODEFICIENCY VIRUS
AIAVAEGTDRV

SEQ ID NO: 7014 - protein, 10 aa, HUMAN IMMUNODEFICIENCY VIRUS
RLINCNTSAI

SEQ ID NO: 7015 - protein, 8 aa, HUMAN IMMUNODEFICIENCY VIRUS
GLIGLRII

SEQ ID NO: 7016 - protein, 8 aa, HUMAN IMMUNODEFICIENCY VIRUS
IIFAVLSI

SEQ ID NO: 7017 - protein, 8 aa, HUMAN IMMUNODEFICIENCY VIRUS
GPDRPEGI

SEQ ID NO: 7018 - protein, 9 aa, HUMAN IMMUNODEFICIENCY VIRUS
LINCNTSAI

SEQ ID NO: 7019 - protein, 9 aa, HUMAN IMMUNODEFICIENCY VIRUS
VITQACPKV

SEQ ID NO: 7020 - protein, 9 aa, HUMAN IMMUNODEFICIENCY VIRUS
GPCKNVSTV

SEQ ID NO: 7021 - protein, 9 aa, HUMAN IMMUNODEFICIENCY VIRUS
DIRQAHCNI

SEQ ID NO: 7022 - protein, 9 aa, HUMAN IMMUNODEFICIENCY VIRUS
GLIGLRIIF

SEQ ID NO: 7023 - protein, 9 aa, HUMAN IMMUNODEFICIENCY VIRUS
IIFAVLSIV

SEQ ID NO: 7024 - protein, 9 aa, HUMAN IMMUNODEFICIENCY VIRUS
LLNATAIAV

SEQ ID NO: 7025 - protein, 10 aa, HUMAN IMMUNODEFICIENCY VIRUS
SVITQACPKV

SEQ ID NO: 7026 - protein, 10 aa, HUMAN IMMUNODEFICIENCY VIRUS
TLPCRIKQII

SEQ ID NO: 7027 - protein, 10 aa, HUMAN IMMUNODEFICIENCY VIRUS
NMWQEVGKAM

SEQ ID NO: 7028 - protein, 10 aa, HUMAN IMMUNODEFICIENCY VIRUS
AVAEGTDRII

SEQ ID NO: 7029 - protein, 11 aa, HUMAN IMMUNODEFICIENCY VIRUS
NMWQEVGKAMY

SEQ ID NO: 7030 - protein, 11 aa, HUMAN IMMUNODEFICIENCY VIRUS
GLIGLRIIFAV

SEQ ID NO: 7031 - protein, 8 aa, HUMAN IMMUNODEFICIENCY VIRUS
LIGLRIIF

SEQ ID NO: 7032 - protein, 9 aa, HUMAN IMMUNODEFICIENCY VIRUS
VVQREKRAV

SEQ ID NO: 7033 - protein, 9 aa, HUMAN IMMUNODEFICIENCY VIRUS
AVAEGTDRI

SEQ ID NO: 7034 - protein, 10 aa, HUMAN IMMUNODEFICIENCY VIRUS
RVVQREKRAV

SEQ ID NO: 7035 - protein, 10 aa, HUMAN IMMUNODEFICIENCY VIRUS
LIGLRIIFAV

SEQ ID NO: 7036 - protein, 10 aa, HUMAN IMMUNODEFICIENCY VIRUS
LVSGFLALAW

SEQ ID NO: 7037 - protein, 10 aa, HUMAN IMMUNODEFICIENCY VIRUS
DLRNLCLFSY

SEQ ID NO: 7038 - protein, 11 aa, HUMAN IMMUNODEFICIENCY VIRUS
LLNGSLAEEEV

SEQ ID NO: 7039 - protein, 11 aa, HUMAN IMMUNODEFICIENCY VIRUS
ELDKWASLWNW

SEQ ID NO: 7040 - protein, 11 aa, HUMAN IMMUNODEFICIENCY VIRUS
RLVSGFLALAW

SEQ ID NO: 7041 - protein, 11 aa, HUMAN IMMUNODEFICIENCY VIRUS
AIAVAEGTDRI

SEQ ID NO: 7042 - protein, 8 aa, HUMAN IMMUNODEFICIENCY VIRUS
VQREKRAV

SEQ ID NO: 7043 - protein, 8 aa, HUMAN IMMUNODEFICIENCY VIRUS
IINMWQEV

SEQ ID NO: 7044 - protein, 8 aa, HUMAN IMMUNODEFICIENCY VIRUS
KLICTTNV

SEQ ID NO: 7045 - protein, 8 aa, HUMAN IMMUNODEFICIENCY VIRUS
SLWNWFDI

SEQ ID NO: 7046 - protein, 8 aa, HUMAN IMMUNODEFICIENCY VIRUS
DLRNLCLF

SEQ ID NO: 7047 - protein, 9 aa, HUMAN IMMUNODEFICIENCY VIRUS
QIINMWQEV

SEQ ID NO: 7048 - protein, 9 aa, HUMAN IMMUNODEFICIENCY VIRUS
LICTTNVPW

SEQ ID NO: 7049 - protein, 10 aa, HUMAN IMMUNODEFICIENCY VIRUS
RPNNNTRKSI

SEQ ID NO: 7050 - protein, 10 aa, HUMAN IMMUNODEFICIENCY VIRUS
KQIINMWQEV

SEQ ID NO: 7051 - protein, 10 aa, HUMAN IMMUNODEFICIENCY VIRUS
EIFRPGGGDM

SEQ ID NO: 7052 - protein, 10 aa, HUMAN IMMUNODEFICIENCY VIRUS
KLICTTNVPW

SEQ ID NO: 7053 - protein, 10 aa, HUMAN IMMUNODEFICIENCY VIRUS
RIVFAVLSIV

SEQ ID NO: 7054 - protein, 11 aa, HUMAN IMMUNODEFICIENCY VIRUS
GVAPTKAKRRV

SEQ ID NO: 7055 - protein, 8 aa, HUMAN IMMUNODEFICIENCY VIRUS
WQEVGKAM

SEQ ID NO: 7056 - protein, 8 aa, HUMAN IMMUNODEFICIENCY VIRUS
GLRIIFAV

SEQ ID NO: 7057 - protein, 9 aa, HUMAN IMMUNODEFICIENCY VIRUS
WQEVGKAMY

SEQ ID NO: 7058 - protein, 9 aa, HUMAN IMMUNODEFICIENCY VIRUS
ELDKWASLW

SEQ ID NO: 7059 - protein, 9 aa, HUMAN IMMUNODEFICIENCY VIRUS
IVFAVLSIV

SEQ ID NO: 7060 - protein, 10 aa, HUMAN IMMUNODEFICIENCY VIRUS
YLRDQQLLGI

SEQ ID NO: 7061 - protein, 11 aa, HUMAN IMMUNODEFICIENCY VIRUS
LPCRIKQIINM

SEQ ID NO: 7062 - protein, 11 aa, HUMAN IMMUNODEFICIENCY VIRUS
EVGKAMYAPPI

SEQ ID NO: 7063 - protein, 11 aa, HUMAN IMMUNODEFICIENCY VIRUS
YLRDQQLLGIW

SEQ ID NO: 7064 - protein, 11 aa, HUMAN IMMUNODEFICIENCY VIRUS
LLELDKWASLW

SEQ ID NO: 7065 - protein, 11 aa, HUMAN IMMUNODEFICIENCY VIRUS
CLFSYHRLRDF

SEQ ID NO: 7066 - protein, 8 aa, HUMAN IMMUNODEFICIENCY VIRUS
KLICTTAV

SEQ ID NO: 7067 - protein, 9 aa, HUMAN IMMUNODEFICIENCY VIRUS
LICTTAVPW

SEQ ID NO: 7068 - protein, 9 aa, HUMAN IMMUNODEFICIENCY VIRUS
RIVFAVLSI

SEQ ID NO: 7069 - protein, 10 aa, HUMAN IMMUNODEFICIENCY VIRUS
KLICTTAVPW

SEQ ID NO: 7070 - protein, 11 aa, HUMAN IMMUNODEFICIENCY VIRUS
GLRIVFAVLSI

SEQ ID NO: 7071 - protein, 8 aa, HUMAN IMMUNODEFICIENCY VIRUS
ELLELDKW

SEQ ID NO: 7072 - protein, 8 aa, HUMAN IMMUNODEFICIENCY VIRUS
IVFAVLSI

SEQ ID NO: 7073 - protein, 9 aa, HUMAN IMMUNODEFICIENCY VIRUS
LPCRIKQII

SEQ ID NO: 7074 - protein, 10 aa, HUMAN IMMUNODEFICIENCY VIRUS
NMVEQMHEDI

SEQ ID NO: 7075 - protein, 11 aa, HUMAN IMMUNODEFICIENCY VIRUS
NMVEQMHEDII

SEQ ID NO: 7076 - protein, 8 aa, HUMAN IMMUNODEFICIENCY VIRUS
DLLALDKW

SEQ ID NO: 7077 - protein, 9 aa, HUMAN IMMUNODEFICIENCY VIRUS
DLEITTHSF

SEQ ID NO: 7078 - protein, 10 aa, HUMAN IMMUNODEFICIENCY VIRUS
VPTDPNPQEV

SEQ ID NO: 7079 - protein, 10 aa, HUMAN IMMUNODEFICIENCY VIRUS
LIGLRIVFAV

SEQ ID NO: 7080 - protein, 11 aa, HUMAN IMMUNODEFICIENCY VIRUS
CVPTDPNPQEV

SEQ ID NO: 7081 - protein, 11 aa, HUMAN IMMUNODEFICIENCY VIRUS
GLIGLRIVFAV

SEQ ID NO: 7082 - protein, 9 aa, HUMAN IMMUNODEFICIENCY VIRUS
APTKAKRRV

SEQ ID NO: 7083 - protein, 10 aa, HUMAN IMMUNODEFICIENCY VIRUS
APTKAKRRVV

SEQ ID NO: 7084 - protein, 10 aa, HUMAN IMMUNODEFICIENCY VIRUS
IVELLGRRGW

SEQ ID NO: 7085 - protein, 11 aa, HUMAN IMMUNODEFICIENCY VIRUS
PVWKEATTTLF

SEQ ID NO: 7086 - protein, 11 aa, HUMAN IMMUNODEFICIENCY VIRUS
EQMHEDIISLW

SEQ ID NO: 7087 - protein, 11 aa, HUMAN IMMUNODEFICIENCY VIRUS
TVQCTHGIRPV

SEQ ID NO: 7088 - protein, 11 aa, HUMAN IMMUNODEFICIENCY VIRUS
RIVELLGRRGW

SEQ ID NO: 7089 - protein, 8 aa, HUMAN IMMUNODEFICIENCY VIRUS
ELLGRRGW

SEQ ID NO: 7090 - protein, 9 aa, HUMAN IMMUNODEFICIENCY VIRUS
MVEQMHEDI

SEQ ID NO: 7091 - protein, 9 aa, HUMAN IMMUNODEFICIENCY VIRUS
VVKIEPLGV

SEQ ID NO: 7092 - protein, 10 aa, HUMAN IMMUNODEFICIENCY VIRUS
MVEQMHEDII

SEQ ID NO: 7093 - protein, 10 aa, HUMAN IMMUNODEFICIENCY VIRUS
KVVKIEPLGV

SEQ ID NO: 7094 - protein, 8 aa, HUMAN IMMUNODEFICIENCY VIRUS
EQMHEDII

SEQ ID NO: 7095 - protein, 9 aa, HUMAN IMMUNODEFICIENCY VIRUS
VVEREKRAV

SEQ ID NO: 7096 - protein, 10 aa, HUMAN IMMUNODEFICIENCY VIRUS
VPTDPNPQEI

SEQ ID NO: 7097 - protein, 10 aa, HUMAN IMMUNODEFICIENCY VIRUS
VQCTHGIRPV

SEQ ID NO: 7098 - protein, 10 aa, HUMAN IMMUNODEFICIENCY VIRUS
RVVEREKRAV

SEQ ID NO: 7099 - protein, 10 aa, HUMAN IMMUNODEFICIENCY VIRUS
QQQNNLLRAI

SEQ ID NO: 7100 - protein, 11 aa, HUMAN IMMUNODEFICIENCY VIRUS
CVPTDPNPQEI

SEQ ID NO: 7101 - protein, 11 aa, HUMAN IMMUNODEFICIENCY VIRUS
VQCTHGIRPVV

SEQ ID NO: 7102 - protein, 11 aa, HUMAN IMMUNODEFICIENCY VIRUS
VQQQNNLLRAI

SEQ ID NO: 7103 - protein, 9 aa, HUMAN IMMUNODEFICIENCY VIRUS
TLPCRIKQI

SEQ ID NO: 7104 - protein, 9 aa, HUMAN IMMUNODEFICIENCY VIRUS
QQNNLLRAI

SEQ ID NO: 7105 - protein, 9 aa, HUMAN IMMUNODEFICIENCY VIRUS
QQSNLLRAI

SEQ ID NO: 7106 - protein, 10 aa, HUMAN IMMUNODEFICIENCY VIRUS
QQQSNLLRAI

SEQ ID NO: 7107 - protein, 11 aa, HUMAN IMMUNODEFICIENCY VIRUS
IPIHYCAPAGF

SEQ ID NO: 7108 - protein, 11 aa, HUMAN IMMUNODEFICIENCY VIRUS
VQQQSNLLRAI

SEQ ID NO: 7109 - protein, 10 aa, HUMAN IMMUNODEFICIENCY VIRUS
PIHYCAPAGF

SEQ ID NO: 7110 - protein, 10 aa, HUMAN IMMUNODEFICIENCY VIRUS
YLKDQQLLGI

SEQ ID NO: 7111 - protein, 11 aa, HUMAN IMMUNODEFICIENCY VIRUS
YLKDQQLLGIW

SEQ ID NO: 7112 - protein, 11 aa, HUMAN IMMUNODEFICIENCY VIRUS
KVSFEPIPIHY

SEQ ID NO: 7113 - protein, 11 aa, HUMAN IMMUNODEFICIENCY VIRUS
TVQCTHGIKPV

SEQ ID NO: 7114 - protein, 10 aa, HUMAN IMMUNODEFICIENCY VIRUS
ELYKYKVVKI

SEQ ID NO: 7115 - protein, 8 aa, HUMAN IMMUNODEFICIENCY VIRUS
LIGLRIVF

SEQ ID NO: 7116 - protein, 8 aa, HUMAN IMMUNODEFICIENCY VIRUS
GLRIVFAV

SEQ ID NO: 7117 - protein, 9 aa, HUMAN IMMUNODEFICIENCY VIRUS
GLIGLRIVF

SEQ ID NO: 7118 - protein, 10 aa, HUMAN IMMUNODEFICIENCY VIRUS
QMHEDIISLW

SEQ ID NO: 7119 - protein, 8 aa, HUMAN IMMUNODEFICIENCY VIRUS
RIKQIINM

SEQ ID NO: 7120 - protein, 9 aa, HUMAN IMMUNODEFICIENCY VIRUS
TQACPKVSF

SEQ ID NO: 7121 - protein, 9 aa, HUMAN IMMUNODEFICIENCY VIRUS
CPKVSFEPI

SEQ ID NO: 7122 - protein, 9 aa, HUMAN IMMUNODEFICIENCY VIRUS
KVSFEPIPI

SEQ ID NO: 7123 - protein, 9 aa, HUMAN IMMUNODEFICIENCY VIRUS
RIKQIINMW

SEQ ID NO: 7124 - protein, 11 aa, HUMAN IMMUNODEFICIENCY VIRUS
NMWKNNMVEQM

SEQ ID NO: 7125 - protein, 11 aa, HUMAN IMMUNODEFICIENCY VIRUS
CPKVSFEPIPI

SEQ ID NO: 7126 - protein, 11 aa, HUMAN IMMUNODEFICIENCY VIRUS
IVGGLIGLRIV

SEQ ID NO: 7127 - protein, 8 aa, HUMAN IMMUNODEFICIENCY VIRUS
LPCRIKQI

SEQ ID NO: 7128 - protein, 9 aa, HUMAN IMMUNODEFICIENCY VIRUS
AVLSIVNRV

SEQ ID NO: 7129 - protein, 11 aa, HUMAN IMMUNODEFICIENCY VIRUS
VQCTHGIKPVV

SEQ ID NO: 7130 - protein, 11 aa, HUMAN IMMUNODEFICIENCY VIRUS
KIFIMIVGGLI

SEQ ID NO: 7131 - protein, 8 aa, HUMAN IMMUNODEFICIENCY VIRUS
GLIGLRIV

SEQ ID NO: 7132 - protein, 10 aa, HUMAN IMMUNODEFICIENCY VIRUS
VQCTHGIKPV

SEQ ID NO: 7133 - protein, 8 aa, HUMAN IMMUNODEFICIENCY VIRUS
LQARVLAV

SEQ ID NO: 7134 - protein, 8 aa, HUMAN IMMUNODEFICIENCY VIRUS
RVLAVERY

SEQ ID NO: 7135 - protein, 9 aa, HUMAN IMMUNODEFICIENCY VIRUS
QLQARVLAV

SEQ ID NO: 7136 - protein, 10 aa, HUMAN IMMUNODEFICIENCY VIRUS
KQLQARVLAV

SEQ ID NO: 7137 - protein, 11 aa, HUMAN IMMUNODEFICIENCY VIRUS
LQARVLAVERY

SEQ ID NO: 7138 - protein, 10 aa, HUMAN IMMUNODEFICIENCY VIRUS
NLWVTVYYGV

SEQ ID NO: 7139 - protein, 8 aa, HUMAN IMMUNODEFICIENCY VIRUS
NVTENFNM

SEQ ID NO: 7140 - protein, 8 aa, HUMAN IMMUNODEFICIENCY VIRUS
NMWKNNMV

SEQ ID NO: 7141 - protein, 8 aa, HUMAN IMMUNODEFICIENCY VIRUS
HLLQLTVW

SEQ ID NO: 7142 - protein, 9 aa, HUMAN IMMUNODEFICIENCY VIRUS
NVTENFNMW

SEQ ID NO: 7143 - protein, 9 aa, HUMAN IMMUNODEFICIENCY VIRUS
QQHLLQLTV

SEQ ID NO: 7144 - protein, 9 aa, HUMAN IMMUNODEFICIENCY VIRUS
LLQLTVWGI

SEQ ID NO: 7145 - protein, 10 aa, HUMAN IMMUNODEFICIENCY VIRUS
AQQHLLQLTV

SEQ ID NO: 7146 - protein, 10 aa, HUMAN IMMUNODEFICIENCY VIRUS
QQHLLQLTVW

SEQ ID NO: 7147 - protein, 10 aa, HUMAN IMMUNODEFICIENCY VIRUS
HLLQLTVWGI

SEQ ID NO: 7148 - protein, 11 aa, HUMAN IMMUNODEFICIENCY VIRUS
AQQHLLQLTVW

SEQ ID NO: 7149 - protein, 8 aa, HUMAN IMMUNODEFICIENCY VIRUS
NLWVTVYY

SEQ ID NO: 7150 - protein, 8 aa, HUMAN IMMUNODEFICIENCY VIRUS
IMIVGGLI

SEQ ID NO: 7151 - protein, 9 aa, HUMAN IMMUNODEFICIENCY VIRUS
FIMIVGGLI

SEQ ID NO: 7152 - protein, 10 aa, HUMAN IMMUNODEFICIENCY VIRUS
DLRSLCLFSY

SEQ ID NO: 7153 - protein, 10 aa, HUMAN IMMUNODEFICIENCY VIRUS
VQARQLLSGI

SEQ ID NO: 7154 - protein, 10 aa, HUMAN IMMUNODEFICIENCY VIRUS
SIVNRVRQGY

SEQ ID NO: 7155 - protein, 11 aa, HUMAN IMMUNODEFICIENCY VIRUS
TMGAASITLTV

SEQ ID NO: 7156 - protein, 11 aa, HUMAN IMMUNODEFICIENCY VIRUS
TVQARQLLSGI

SEQ ID NO: 7157 - protein, 11 aa, HUMAN IMMUNODEFICIENCY VIRUS
VQARQLLSGIV

SEQ ID NO: 7158 - protein, 11 aa, HUMAN IMMUNODEFICIENCY VIRUS
MIVGGLIGLRI

SEQ ID NO: 7159 - protein, 11 aa, HUMAN IMMUNODEFICIENCY VIRUS
DMRDNWRSELY

SEQ ID NO: 7160 - protein, 8 aa, HUMAN IMMUNODEFICIENCY VIRUS
VLSIVNRV

SEQ ID NO: 7161 - protein, 8 aa, HUMAN IMMUNODEFICIENCY VIRUS
DLRSLCLF

SEQ ID NO: 7162 - protein, 9 aa, HUMAN IMMUNODEFICIENCY VIRUS
IVNRVRQGY

SEQ ID NO: 7163 - protein, 11 aa, HUMAN IMMUNODEFICIENCY VIRUS
RPGGGDMRDNW

SEQ ID NO: 7164 - protein, 9 aa, HUMAN IMMUNODEFICIENCY VIRUS
YIKIFIMIV

SEQ ID NO: 7165 - protein, 9 aa, HUMAN IMMUNODEFICIENCY VIRUS
GIKQLQARV

SEQ ID NO: 7166 - protein, 11 aa, HUMAN IMMUNODEFICIENCY VIRUS
TLFCASDAKAY

SEQ ID NO: 7167 - protein, 10 aa, HUMAN IMMUNODEFICIENCY VIRUS
IVGGLIGLRI

SEQ ID NO: 7168 - protein, 8 aa, HUMAN IMMUNODEFICIENCY VIRUS
YIKIFIMI

SEQ ID NO: 7169 - protein, 10 aa, HUMAN IMMUNODEFICIENCY VIRUS
WLWYIKIFIM

SEQ ID NO: 7170 - protein, 11 aa, HUMAN IMMUNODEFICIENCY VIRUS
WLWYIKIFIMI

SEQ ID NO: 7171 - protein, 8 aa, HUMAN IMMUNODEFICIENCY VIRUS
LQLTVWGI

SEQ ID NO: 7172 - protein, 11 aa, HUMAN IMMUNODEFICIENCY VIRUS
SLWDQSLKPCV

SEQ ID NO: 7173 - protein, 11 aa, HUMAN IMMUNODEFICIENCY VIRUS
RVRQGYSPLSF

SEQ ID NO: 7174 - protein, 9 aa, HUMAN IMMUNODEFICIENCY VIRUS
RQGYSPLSF

SEQ ID NO: 7175 - protein, 10 aa, HUMAN IMMUNODEFICIENCY VIRUS
GIWGCSGKLI

SEQ ID NO: 7176 - protein, 8 aa, HUMAN IMMUNODEFICIENCY VIRUS
RQLLSGIV

SEQ ID NO: 7177 - protein, 9 aa, HUMAN IMMUNODEFICIENCY VIRUS
NVWATHACV

SEQ ID NO: 7178 - protein, 9 aa, HUMAN IMMUNODEFICIENCY VIRUS
WLWYIKIFI

SEQ ID NO: 7179 - protein, 8 aa, HUMAN IMMUNODEFICIENCY VIRUS
DQSLKPCV

SEQ ID NO: 7180 - protein, 8 aa, HUMAN IMMUNODEFICIENCY VIRUS
WLWYIKIF

SEQ ID NO: 7181 - protein, 8 aa, HUMAN IMMUNODEFICIENCY VIRUS
TVQCTHGI

SEQ ID NO: 7182 - protein, 8 aa, HUMAN IMMUNODEFICIENCY VIRUS
DQQLLGIW

SEQ ID NO: 7183 - protein, 11 aa, HUMAN IMMUNODEFICIENCY VIRUS
NVSTVQCTHGI

SEQ ID NO: 7184 - protein, 11 aa, HUMAN IMMUNODEFICIENCY VIRUS
KPCVKLTPLCV

SEQ ID NO: 7185 - protein, 8 aa, HUMAN IMMUNODEFICIENCY VIRUS
TVYYGVPV

SEQ ID NO: 7186 - protein, 9 aa, HUMAN IMMUNODEFICIENCY VIRUS
TVYYGVPVW

SEQ ID NO: 7187 - protein, 9 aa, HUMAN IMMUNODEFICIENCY VIRUS
CVKLTPLCV

SEQ ID NO: 7188 - protein, 9 aa, HUMAN IMMUNODEFICIENCY VIRUS
FLGAAGSTM

SEQ ID NO: 7189 - protein, 10 aa, HUMAN IMMUNODEFICIENCY VIRUS
WVTVYYGVPV

SEQ ID NO: 7190 - protein, 11 aa, HUMAN IMMUNODEFICIENCY VIRUS
WVTVYYGVPVW

SEQ ID NO: 7191 - protein, 8 aa, HUMAN IMMUNODEFICIENCY VIRUS
ELYKYKVV

SEQ ID NO: 7192 - protein, 8 aa, HUMAN IMMUNODEFICIENCY VIRUS
WVTVYYGV

SEQ ID NO: 7193 - protein, 8 aa, HUMAN IMMUNODEFICIENCY VIRUS
PPPESFRF

SEQ ID NO: 7194 - protein, 8 aa, HUMAN IMMUNODEFICIENCY VIRUS
EPIDKELY

SEQ ID NO: 7195 - protein, 9 aa, HUMAN IMMUNODEFICIENCY VIRUS
APPPESFRF

SEQ ID NO: 7196 - protein, 10 aa, HUMAN IMMUNODEFICIENCY VIRUS
KQEPIDKELY

SEQ ID NO: 7197 - protein, 10 aa, HUMAN IMMUNODEFICIENCY VIRUS
KQETIDKDLY

SEQ ID NO: 7198 - protein, 10 aa, HUMAN IMMUNODEFICIENCY VIRUS
EPLTALRSLF

SEQ ID NO: 7199 - protein, 10 aa, HUMAN IMMUNODEFICIENCY VIRUS
PPLASLKSLF

SEQ ID NO: 7200 - protein, 10 aa, HUMAN IMMUNODEFICIENCY VIRUS
PPLISLKSLF

SEQ ID NO: 7201 - protein, 10 aa, HUMAN IMMUNODEFICIENCY VIRUS
EPTAPPAESF

SEQ ID NO: 7202 - protein, 10 aa, HUMAN IMMUNODEFICIENCY VIRUS
EPTAPPPESF

SEQ ID NO: 7203 - protein, 8 aa, HUMAN IMMUNODEFICIENCY VIRUS
PPAESFRF

SEQ ID NO: 7204 - protein, 9 aa, HUMAN IMMUNODEFICIENCY VIRUS
APPAESFRF

SEQ ID NO: 7205 - protein, 10 aa, HUMAN IMMUNODEFICIENCY VIRUS
PPLASLKSLF

SEQ ID NO: 7206 - protein, 10 aa, HUMAN IMMUNODEFICIENCY VIRUS
YPLASLRSLF

SEQ ID NO: 7207 - protein, 10 aa, HUMAN IMMUNODEFICIENCY VIRUS
YPLASLKSLF

SEQ ID NO: 7208 - protein, 9 aa, HUMAN IMMUNODEFICIENCY VIRUS
NIMMQRGNF

SEQ ID NO: 7209 - protein, 9 aa, HUMAN IMMUNODEFICIENCY VIRUS
TPSQKQEPI

SEQ ID NO: 7210 - protein, 9 aa, HUMAN IMMUNODEFICIENCY VIRUS
NPPIPVGDI

SEQ ID NO: 7211 - protein, 10 aa, HUMAN IMMUNODEFICIENCY VIRUS
NPPIPVGDIY

SEQ ID NO: 7212 - protein, 11 aa, HUMAN IMMUNODEFICIENCY VIRUS
QIGWMTSNPPI

SEQ ID NO: 7213 - protein, 8 aa, HUMAN IMMUNODEFICIENCY VIRUS
KLDKWEKI

SEQ ID NO: 7214 - protein, 8 aa, HUMAN IMMUNODEFICIENCY VIRUS
GPVAPGQM

SEQ ID NO: 7215 - protein, 8 aa, HUMAN IMMUNODEFICIENCY VIRUS
PPIPVGDI

SEQ ID NO: 7216 - protein, 8 aa, HUMAN IMMUNODEFICIENCY VIRUS
PPAESFGF

SEQ ID NO: 7217 - protein, 9 aa, HUMAN IMMUNODEFICIENCY VIRUS
PPIPVGDIY

SEQ ID NO: 7218 - protein, 9 aa, HUMAN IMMUNODEFICIENCY VIRUS
APPAESFGF

SEQ ID NO: 7219 - protein, 10 aa, HUMAN IMMUNODEFICIENCY VIRUS
ALSPRTLNAW

SEQ ID NO: 7220 - protein, 11 aa, HUMAN IMMUNODEFICIENCY VIRUS
ALSPRTLNAWV

SEQ ID NO: 7221 - protein, 11 aa, HUMAN IMMUNODEFICIENCY VIRUS
IPVGDIYKRWI

SEQ ID NO: 7222 - protein, 11 aa, HUMAN IMMUNODEFICIENCY VIRUS
VQNANPDCKSI

SEQ ID NO: 7223 - protein, 8 aa, HUMAN IMMUNODEFICIENCY VIRUS
PIPVGDIY

SEQ ID NO: 7224 - protein, 8 aa, HUMAN IMMUNODEFICIENCY VIRUS
SQEVKNWM

SEQ ID NO: 7225 - protein, 8 aa, HUMAN IMMUNODEFICIENCY VIRUS
IMMQKSNF

SEQ ID NO: 7226 - protein, 10 aa, HUMAN IMMUNODEFICIENCY VIRUS
PQDLNMMLNI

SEQ ID NO: 7227 - protein, 10 aa, HUMAN IMMUNODEFICIENCY VIRUS
IPVGDIYKRW

SEQ ID NO: 7228 - protein, 10 aa, HUMAN IMMUNODEFICIENCY VIRUS
EQASQEVKNW

SEQ ID NO: 7229 - protein, 11 aa, HUMAN IMMUNODEFICIENCY VIRUS
TPQDLNMMLNI

SEQ ID NO: 7230 - protein, 11 aa, HUMAN IMMUNODEFICIENCY VIRUS
PQDLNMMLNIV

SEQ ID NO: 7231 - protein, 11 aa, HUMAN IMMUNODEFICIENCY VIRUS
IVGGHQAAMQM

SEQ ID NO: 7232 - protein, 11 aa, HUMAN IMMUNODEFICIENCY VIRUS
TLRAEQATQDV

SEQ ID NO: 7233 - protein, 11 aa, HUMAN IMMUNODEFICIENCY VIRUS
EQASQEVKNWM

SEQ ID NO: 7234 - protein, 11 aa, HUMAN IMMUNODEFICIENCY VIRUS
WPSSKGRPGNF

SEQ ID NO: 7235 - protein, 8 aa, HUMAN IMMUNODEFICIENCY VIRUS
EPIDKELY

SEQ ID NO: 7236 - protein, 10 aa, HUMAN IMMUNODEFICIENCY VIRUS
KQEPIDKELY

SEQ ID NO: 7237 - protein, 8 aa, HUMAN IMMUNODEFICIENCY VIRUS
TPQDLNMM

SEQ ID NO: 7238 - protein, 8 aa, HUMAN IMMUNODEFICIENCY VIRUS
DLNMMLNI

SEQ ID NO: 7239 - protein, 8 aa, HUMAN IMMUNODEFICIENCY VIRUS
TLQEQIAW

SEQ ID NO: 7240 - protein, 9 aa, HUMAN IMMUNODEFICIENCY VIRUS
TLYCVHQKI

SEQ ID NO: 7241 - protein, 9 aa, HUMAN IMMUNODEFICIENCY VIRUS
DLNMMLNIV

SEQ ID NO: 7242 - protein, 9 aa, HUMAN IMMUNODEFICIENCY VIRUS
IVGGHQAAM

SEQ ID NO: 7243 - protein, 9 aa, HUMAN IMMUNODEFICIENCY VIRUS
TLQEQIAWM

SEQ ID NO: 7244 - protein, 9 aa, HUMAN IMMUNODEFICIENCY VIRUS
PLTSLKSLF

SEQ ID NO: 7245 - protein, 9 aa, HUMAN IMMUNODEFICIENCY VIRUS
PLTSLRSLF

SEQ ID NO: 7246 - protein, 10 aa, HUMAN IMMUNODEFICIENCY VIRUS
NIVGGHQAAM

SEQ ID NO: 7247 - protein, 11 aa, HUMAN IMMUNODEFICIENCY VIRUS
TLRAEQASQEV

SEQ ID NO: 7248 - protein, 9 aa, HUMAN IMMUNODEFICIENCY VIRUS
TIMMQRGNF

SEQ ID NO: 7249 - protein, 8 aa, HUMAN IMMUNODEFICIENCY VIRUS
SPTSILDI

SEQ ID NO: 7250 - protein, 11 aa, HUMAN IMMUNODEFICIENCY VIRUS
RMYSPTSILDI

SEQ ID NO: 7251 - protein, 8 aa, HUMAN IMMUNODEFICIENCY VIRUS
LQEQIAWM

SEQ ID NO: 7252 - protein, 8 aa, HUMAN IMMUNODEFICIENCY VIRUS
RMYSPTSI

SEQ ID NO: 7253 - protein, 9 aa, HUMAN IMMUNODEFICIENCY VIRUS
VQNAQGQMV

SEQ ID NO: 7254 - protein, 10 aa, HUMAN IMMUNODEFICIENCY VIRUS
IVQNAQGQMV

SEQ ID NO: 7255 - protein, 10 aa, HUMAN IMMUNODEFICIENCY VIRUS
RVHPVHAGPI

SEQ ID NO: 7256 - protein, 10 aa, HUMAN IMMUNODEFICIENCY VIRUS
IVRMYSPTSI

SEQ ID NO: 7257 - protein, 11 aa, HUMAN IMMUNODEFICIENCY VIRUS
PIVQNAQGQMV

SEQ ID NO: 7258 - protein, 11 aa, HUMAN IMMUNODEFICIENCY VIRUS
KIVRMYSPTSI

SEQ ID NO: 7259 - protein, 11 aa, HUMAN IMMUNODEFICIENCY VIRUS
WPSNKGRPGNF

SEQ ID NO: 7260 - protein, 8 aa, HUMAN IMMUNODEFICIENCY VIRUS
KVSQNYPI

SEQ ID NO: 7261 - protein, 9 aa, HUMAN IMMUNODEFICIENCY VIRUS
KVSQNYPIV

SEQ ID NO: 7262 - protein, 8 aa, HUMAN IMMUNODEFICIENCY VIRUS
TQDVKNWM

SEQ ID NO: 7263 - protein, 8 aa, HUMAN IMMUNODEFICIENCY VIRUS
PPEESFRF

SEQ ID NO: 7264 - protein, 9 aa, HUMAN IMMUNODEFICIENCY VIRUS
ELRSLYNTV

SEQ ID NO: 7265 - protein, 9 aa, HUMAN IMMUNODEFICIENCY VIRUS
TLYCVHQRI

SEQ ID NO: 7266 - protein, 9 aa, HUMAN IMMUNODEFICIENCY VIRUS
APPEESFRF

SEQ ID NO: 7267 - protein, 9 aa, HUMAN IMMUNODEFICIENCY VIRUS
PLASLKSLF

SEQ ID NO: 7268 - protein, 10 aa, HUMAN IMMUNODEFICIENCY VIRUS
VLSGGKLDAW

SEQ ID NO: 7269 - protein, 10 aa, HUMAN IMMUNODEFICIENCY VIRUS
SLFNTVATLY

SEQ ID NO: 7270 - protein, 10 aa, HUMAN IMMUNODEFICIENCY VIRUS
LQGQMVHQAI

SEQ ID NO: 7271 - protein, 10 aa, HUMAN IMMUNODEFICIENCY VIRUS
EQATQDVKNW

SEQ ID NO: 7272 - protein, 10 aa, HUMAN IMMUNODEFICIENCY VIRUS
EPTAPPEESF

SEQ ID NO: 7273 - protein, 11 aa, HUMAN IMMUNODEFICIENCY VIRUS
SVLSGGKLDAW

SEQ ID NO: 7274 - protein, 11 aa, HUMAN IMMUNODEFICIENCY VIRUS
NLQGQMVHQAI

SEQ ID NO: 7275 - protein, 11 aa, HUMAN IMMUNODEFICIENCY VIRUS
EQATQDVKNWM

SEQ ID NO: 7276 - protein, 8 aa, HUMAN IMMUNODEFICIENCY VIRUS
WMTSNPPI

SEQ ID NO: 7277 - protein, 9 aa, HUMAN IMMUNODEFICIENCY VIRUS
GPAATLEEM

SEQ ID NO: 7278 - protein, 10 aa, HUMAN IMMUNODEFICIENCY VIRUS
WMTSNPPIPV

SEQ ID NO: 7279 - protein, 10 aa, HUMAN IMMUNODEFICIENCY VIRUS
GPAATLEEMM

SEQ ID NO: 7280 - protein, 11 aa, HUMAN IMMUNODEFICIENCY VIRUS
LLETSEGCRQI

SEQ ID NO: 7281 - protein, 11 aa, HUMAN IMMUNODEFICIENCY VIRUS
ALGPAATLEEM

SEQ ID NO: 7282 - protein, 8 aa, HUMAN IMMUNODEFICIENCY VIRUS
GPIPPGQM

SEQ ID NO: 7283 - protein, 8 aa, HUMAN IMMUNODEFICIENCY VIRUS
DIYKRWII

SEQ ID NO: 7284 - protein, 10 aa, HUMAN IMMUNODEFICIENCY VIRUS
PVGDIYKRWI

SEQ ID NO: 7285 - protein, 11 aa, HUMAN IMMUNODEFICIENCY VIRUS
PVGDIYKRWII

SEQ ID NO: 7286 - protein, 11 aa, HUMAN IMMUNODEFICIENCY VIRUS
ALGPGATLEEM

SEQ ID NO: 7287 - protein, 11 aa, HUMAN IMMUNODEFICIENCY VIRUS
QIGWMTNNPPI

SEQ ID NO: 7288 - protein, 8 aa, HUMAN IMMUNODEFICIENCY VIRUS
KLDAWEKI

SEQ ID NO: 7289 - protein, 8 aa, HUMAN IMMUNODEFICIENCY VIRUS
TQEVKNWM

SEQ ID NO: 7290 - protein, 9 aa, HUMAN IMMUNODEFICIENCY VIRUS
PVGDIYKRW

SEQ ID NO: 7291 - protein, 9 aa, HUMAN IMMUNODEFICIENCY VIRUS
GPGATLEEM

SEQ ID NO: 7292 - protein, 10 aa, HUMAN IMMUNODEFICIENCY VIRUS
EQATQEVKNW

SEQ ID NO: 7293 - protein, 10 aa, HUMAN IMMUNODEFICIENCY VIRUS
GPGATLEEMM

SEQ ID NO: 7294 - protein, 11 aa, HUMAN IMMUNODEFICIENCY VIRUS
EQATQEVKNWM

SEQ ID NO: 7295 - protein, 8 aa, HUMAN IMMUNODEFICIENCY VIRUS
GPIAPGQM

SEQ ID NO: 7296 - protein, 8 aa, HUMAN IMMUNODEFICIENCY VIRUS
GPSHKARV

SEQ ID NO: 7297 - protein, 10 aa, HUMAN IMMUNODEFICIENCY VIRUS
DIKQGPKEPF

SEQ ID NO: 7298 - protein, 11 aa, HUMAN IMMUNODEFICIENCY VIRUS
IVWASRELERF

SEQ ID NO: 7299 - protein, 11 aa, HUMAN IMMUNODEFICIENCY VIRUS
GVGGPSHKARV

SEQ ID NO: 7300 - protein, 8 aa, HUMAN IMMUNODEFICIENCY VIRUS
WMTNNPPI

SEQ ID NO: 7301 - protein, 10 aa, HUMAN IMMUNODEFICIENCY VIRUS
WMTNNPPIPV

SEQ ID NO: 7302 - protein, 10 aa, HUMAN IMMUNODEFICIENCY VIRUS
EPTAPPAESF

SEQ ID NO: 7303 - protein, 11 aa, HUMAN IMMUNODEFICIENCY VIRUS
YPIVQNAQGQM

SEQ ID NO: 7304 - protein, 11 aa, HUMAN IMMUNODEFICIENCY VIRUS
VIEEKAFSPEV

SEQ ID NO: 7305 - protein, 8 aa, HUMAN IMMUNODEFICIENCY VIRUS
VQNAQGQM

SEQ ID NO: 7306 - protein, 8 aa, HUMAN IMMUNODEFICIENCY VIRUS
KQGPKEPF

SEQ ID NO: 7307 - protein, 9 aa, HUMAN IMMUNODEFICIENCY VIRUS
IVQNAQGQM

SEQ ID NO: 7308 - protein, 10 aa, HUMAN IMMUNODEFICIENCY VIRUS
PIVQNAQGQM

SEQ ID NO: 7309 - protein, 11 aa, HUMAN IMMUNODEFICIENCY VIRUS
KQGPKEPFRDY

SEQ ID NO: 7310 - protein, 9 aa, HUMAN IMMUNODEFICIENCY VIRUS
SQVSQNYPI

SEQ ID NO: 7311 - protein, 10 aa, HUMAN IMMUNODEFICIENCY VIRUS
SQVSQNYPIV

SEQ ID NO: 7312 - protein, 8 aa, HUMAN IMMUNODEFICIENCY VIRUS
WMTDTLLV

SEQ ID NO: 7313 - protein, 10 aa, HUMAN IMMUNODEFICIENCY VIRUS
SLYNTVATLY

SEQ ID NO: 7314 - protein, 10 aa, HUMAN IMMUNODEFICIENCY VIRUS
RLHPVHAGPI

SEQ ID NO: 7315 - protein, 11 aa, HUMAN IMMUNODEFICIENCY VIRUS
WPSHKGRPGNF

SEQ ID NO: 7316 - protein, 8 aa, HUMAN IMMUNODEFICIENCY VIRUS
KVIEEKAF

SEQ ID NO: 7317 - protein, 10 aa, HUMAN IMMUNODEFICIENCY VIRUS
WVKVIEEKAF

SEQ ID NO: 7318 - protein, 11 aa, HUMAN IMMUNODEFICIENCY VIRUS
TLRAEQATQEV

SEQ ID NO: 7319 - protein, 11 aa, HUMAN IMMUNODEFICIENCY VIRUS
LVWASRELERF

SEQ ID NO: 7320 - protein, 8 aa, HUMAN IMMUNODEFICIENCY VIRUS
MQMLKETI

SEQ ID NO: 7321 - protein, 9 aa, HUMAN IMMUNODEFICIENCY VIRUS
AMQMLKETI

SEQ ID NO: 7322 - protein, 8 aa, HUMAN IMMUNODEFICIENCY VIRUS
QVSQNYPI

SEQ ID NO: 7323 - protein, 9 aa, HUMAN IMMUNODEFICIENCY VIRUS
QVSQNYPIV

SEQ ID NO: 7324 - protein, 8 aa, HUMAN IMMUNODEFICIENCY VIRUS
TLQEQIGW

SEQ ID NO: 7325 - protein, 8 aa, HUMAN IMMUNODEFICIENCY VIRUS
IMMQRGNF

SEQ ID NO: 7326 - protein, 9 aa, HUMAN IMMUNODEFICIENCY VIRUS
TLQEQIGWM

SEQ ID NO: 7327 - protein, 8 aa, HUMAN IMMUNODEFICIENCY VIRUS
GQMVHQAI

SEQ ID NO: 7328 - protein, 8 aa, HUMAN IMMUNODEFICIENCY VIRUS
KVVEEKAF

SEQ ID NO: 7329 - protein, 10 aa, HUMAN IMMUNODEFICIENCY VIRUS
WVKVVEEKAF

SEQ ID NO: 7330 - protein, 11 aa, HUMAN IMMUNODEFICIENCY VIRUS
VVEEKAFSPEV

SEQ ID NO: 7331 - protein, 11 aa, HUMAN IMMUNODEFICIENCY VIRUS
EPFRDYVDRFY

SEQ ID NO: 7332 - protein, 8 aa, HUMAN IMMUNODEFICIENCY VIRUS
VQNLQGQM

SEQ ID NO: 7333 - protein, 8 aa, HUMAN IMMUNODEFICIENCY VIRUS
LQEQIGWM

SEQ ID NO: 7334 - protein, 9 aa, HUMAN IMMUNODEFICIENCY VIRUS
IVQNLQGQM

SEQ ID NO: 7335 - protein, 9 aa, HUMAN IMMUNODEFICIENCY VIRUS
VQNLQGQMV

SEQ ID NO: 7336 - protein, 10 aa, HUMAN IMMUNODEFICIENCY VIRUS
PIVQNLQGQM

SEQ ID NO: 7337 - protein, 10 aa, HUMAN IMMUNODEFICIENCY VIRUS
IVQNLQGQMV

SEQ ID NO: 7338 - protein, 10 aa, HUMAN IMMUNODEFICIENCY VIRUS
AISPRTLNAW

SEQ ID NO: 7339 - protein, 11 aa, HUMAN IMMUNODEFICIENCY VIRUS
YPIVQNLQGQM

SEQ ID NO: 7340 - protein, 11 aa, HUMAN IMMUNODEFICIENCY VIRUS
PIVQNLQGQMV

SEQ ID NO: 7341 - protein, 11 aa, HUMAN IMMUNODEFICIENCY VIRUS
AISPRTLNAWV

SEQ ID NO: 7342 - protein, 9 aa, HUMAN IMMUNODEFICIENCY VIRUS
TLNAWVKVI

SEQ ID NO: 7343 - protein, 9 aa, HUMAN IMMUNODEFICIENCY VIRUS
TLNAWVKVV

SEQ ID NO: 7344 - protein, 8 aa, HUMAN IMMUNODEFICIENCY VIRUS
MQMLKDTI

SEQ ID NO: 7345 - protein, 9 aa, HUMAN IMMUNODEFICIENCY VIRUS
AMQMLKDTI

SEQ ID NO: 7346 - protein, 9 aa, HUMAN IMMUNODEFICIENCY VIRUS
VLAEAMSQV

SEQ ID NO: 7347 - protein, 10 aa, HUMAN IMMUNODEFICIENCY VIRUS
RVLAEAMSQV

SEQ ID NO: 7348 - protein, 9 aa, HUMAN IMMUNODEFICIENCY VIRUS
NPPIPVGEI

SEQ ID NO: 7349 - protein, 10 aa, HUMAN IMMUNODEFICIENCY VIRUS
NPPIPVGEIY

SEQ ID NO: 7350 - protein, 10 aa, HUMAN IMMUNODEFICIENCY VIRUS
RLRPGGKKKY

SEQ ID NO: 7351 - protein, 10 aa, HUMAN IMMUNODEFICIENCY VIRUS
IPVGEIYKRW

SEQ ID NO: 7352 - protein, 11 aa, HUMAN IMMUNODEFICIENCY VIRUS
PIPVGEIYKRW

SEQ ID NO: 7353 - protein, 11 aa, HUMAN IMMUNODEFICIENCY VIRUS
IPVGEIYKRWI

SEQ ID NO: 7354 - protein, 8 aa, HUMAN IMMUNODEFICIENCY VIRUS
RPGGKKKY

SEQ ID NO: 7355 - protein, 8 aa, HUMAN IMMUNODEFICIENCY VIRUS
PPIPVGEI

SEQ ID NO: 7356 - protein, 8 aa, HUMAN IMMUNODEFICIENCY VIRUS
PIPVGEIY

SEQ ID NO: 7357 - protein, 9 aa, HUMAN IMMUNODEFICIENCY VIRUS
PPIPVGEIY

SEQ ID NO: 7358 - protein, 11 aa, HUMAN IMMUNODEFICIENCY VIRUS
EPFRDYVDRFF

SEQ ID NO: 7359 - protein, 8 aa, HUMAN IMMUNODEFICIENCY VIRUS
GPGHKARV

SEQ ID NO: 7360 - protein, 11 aa, HUMAN IMMUNODEFICIENCY VIRUS
GVGGPGHKARV

SEQ ID NO: 7361 - protein, 8 aa, HUMAN IMMUNODEFICIENCY VIRUS
WMTETLLV

SEQ ID NO: 7362 - protein, 8 aa, HUMAN IMMUNODEFICIENCY VIRUS
HPVHAGPI

SEQ ID NO: 7363 - protein, 11 aa, HUMAN IMMUNODEFICIENCY VIRUS
RMYSPVSILDI

SEQ ID NO: 7364 - protein, 8 aa, HUMAN IMMUNODEFICIENCY VIRUS
EIYKRWII

SEQ ID NO: 7365 - protein, 11 aa, HUMAN IMMUNODEFICIENCY VIRUS
PVGEIYKRWII

SEQ ID NO: 7366 - protein, 11 aa, HUMAN IMMUNODEFICIENCY VIRUS
KIVRMYSPVSI

SEQ ID NO: 7367 - protein, 8 aa, HUMAN IMMUNODEFICIENCY VIRUS
RMYSPVSI

SEQ ID NO: 7368 - protein, 8 aa, HUMAN IMMUNODEFICIENCY VIRUS
SPVSILDI

SEQ ID NO: 7369 - protein, 9 aa, HUMAN IMMUNODEFICIENCY VIRUS
PVGEIYKRW

SEQ ID NO: 7370 - protein, 10 aa, HUMAN IMMUNODEFICIENCY VIRUS
PVGEIYKRWI

SEQ ID NO: 7371 - protein, 10 aa, HUMAN IMMUNODEFICIENCY VIRUS
IVRMYSPVSI

SEQ ID NO: 7372 - protein, 8 aa, HUMAN IMMUNODEFICIENCY VIRUS
TVATLYCV

SEQ ID NO: 7373 - protein, 9 aa, HUMAN IMMUNODEFICIENCY VIRUS
KIVRMYSPV

SEQ ID NO: 7374 - protein, 10 aa, HUMAN IMMUNODEFICIENCY VIRUS
DIRQGPKEPF

SEQ ID NO: 7375 - protein, 11 aa, HUMAN IMMUNODEFICIENCY VIRUS
PQDLNTMLNTV

SEQ ID NO: 7376 - protein, 8 aa, HUMAN IMMUNODEFICIENCY VIRUS
TPQDLNTM

SEQ ID NO: 7377 - protein, 8 aa, HUMAN IMMUNODEFICIENCY VIRUS
IVRMYSPV

SEQ ID NO: 7378 - protein, 8 aa, HUMAN IMMUNODEFICIENCY VIRUS
RQGPKEPF

SEQ ID NO: 7379 - protein, 9 aa, HUMAN IMMUNODEFICIENCY VIRUS
DLNTMLNTV

SEQ ID NO: 7380 - protein, 11 aa, HUMAN IMMUNODEFICIENCY VIRUS
RQGPKEPFRDY

SEQ ID NO: 7381 - protein, 10 aa, HUMAN IMMUNODEFICIENCY VIRUS
QMREPRGSDI

SEQ ID NO: 7382 - protein, 11 aa, HUMAN IMMUNODEFICIENCY VIRUS
GQMREPRGSDI

SEQ ID NO: 7383 - protein, 11 aa, HUMAN IMMUNODEFICIENCY VIRUS
VQNANPDCKTI

SEQ ID NO: 7384 - protein, 9 aa, HUMAN IMMUNODEFICIENCY VIRUS
TVGGHQAAM

SEQ ID NO: 7385 - protein, 11 aa, HUMAN IMMUNODEFICIENCY VIRUS
TVGGHQAAMQM

SEQ ID NO: 7386 - protein, 9 aa, HUMAN IMMUNODEFICIENCY VIRUS
TINEEAAEW

SEQ ID NO: 7387 - protein, 8 aa, HUMAN IMMUNODEFICIENCY VIRUS
SPEVIPMF

SEQ ID NO: 7388 - protein, 8 aa, HUMAN IMMUNODEFICIENCY VIRUS
APRKKGCW

SEQ ID NO: 7389 - protein, 11 aa, HUMAN IMMUNODEFICIENCY VIRUS
SPRTLNAWVKV

SEQ ID NO: 7390 - protein, 9 aa, HUMAN IMMUNODEFICIENCY VIRUS
RQANFLGKI

SEQ ID NO: 7391 - protein, 10 aa, HUMAN IMMUNODEFICIENCY VIRUS
RQANFLGKIW

SEQ ID NO: 7392 - protein, 11 aa, HUMAN IMMUNODEFICIENCY VIRUS
IILGLNKIVRM

SEQ ID NO: 7393 - protein, 8 aa, HUMAN IMMUNODEFICIENCY VIRUS
SPRTLNAW

SEQ ID NO: 7394 - protein, 8 aa, HUMAN IMMUNODEFICIENCY VIRUS
IILGLNKI

SEQ ID NO: 7395 - protein, 9 aa, HUMAN IMMUNODEFICIENCY VIRUS
SPRTLNAWV

SEQ ID NO: 7396 - protein, 9 aa, HUMAN IMMUNODEFICIENCY VIRUS
WIILGLNKI

SEQ ID NO: 7397 - protein, 9 aa, HUMAN IMMUNODEFICIENCY VIRUS
IILGLNKIV

SEQ ID NO: 7398 - protein, 10 aa, HUMAN IMMUNODEFICIENCY VIRUS
WIILGLNKIV

SEQ ID NO: 7399 - protein, 10 aa, HUMAN IMMUNODEFICIENCY VIRUS
ILGLNKIVRM

SEQ ID NO: 7400 - protein, 11 aa, HUMAN IMMUNODEFICIENCY VIRUS
ILGLNKIVRMY

SEQ ID NO: 7401 - protein, 8 aa, HUMAN IMMUNODEFICIENCY VIRUS
ILGLNKIV

SEQ ID NO: 7402 - protein, 9 aa, HUMAN IMMUNODEFICIENCY VIRUS
EMMTACQGV

SEQ ID NO: 7403 - protein, 8 aa, HUMAN IMMUNODEFICIENCY VIRUS
GLNKIVRM

SEQ ID NO: 7404 - protein, 8 aa, HUMAN IMMUNODEFICIENCY VIRUS
MMTACQGV

SEQ ID NO: 7405 - protein, 9 aa, HUMAN IMMUNODEFICIENCY VIRUS
GLNKIVRMY

SEQ ID NO: 7406 - protein, 8 aa, HUMAN IMMUNODEFICIENCY VIRUS
TLNAWVKV

SEQ ID NO: 7407 - protein, 9 aa, HUMAN IMMUNODEFICIENCY VIRUS
GPKEPFRDY

SEQ ID NO: 7408 - protein, 10 aa, HUMAN IMMUNODEFICIENCY VIRUS
GPKEPFRDYV

SEQ ID NO: 7409 - protein, 10 aa, HUMAN IMMUNODEFICIENCY VIRUS
EPFRDYVDRF

SEQ ID NO: 7410 - protein, 8 aa, HUMAN IMMUNODEFICIENCY VIRUS
APTAAKGV

SEQ ID NO: 7411 - protein, 11 aa, HUMAN IMMUNODEFICIENCY VIRUS
APTAAKGVGAV

SEQ ID NO: 7412 - protein, 10 aa, HUMAN IMMUNODEFICIENCY VIRUS
KQAEPAAEGV

SEQ ID NO: 7413 - protein, 10 aa, HUMAN IMMUNODEFICIENCY VIRUS
RQAPTAAKGV

SEQ ID NO: 7414 - protein, 10 aa, HUMAN IMMUNODEFICIENCY VIRUS
AQAEPAAAGV

SEQ ID NO: 7415 - protein, 10 aa, HUMAN IMMUNODEFICIENCY VIRUS
EPAADGVGAV

SEQ ID NO: 7416 - protein, 8 aa, HUMAN IMMUNODEFICIENCY VIRUS
VPLRPMTF

SEQ ID NO: 7417 - protein, 8 aa, HUMAN IMMUNODEFICIENCY VIRUS
HPICQHGM

SEQ ID NO: 7418 - protein, 9 aa, HUMAN IMMUNODEFICIENCY VIRUS
QVPLRPMTF

SEQ ID NO: 7419 - protein, 10 aa, HUMAN IMMUNODEFICIENCY VIRUS
PQVPLRPMTF

SEQ ID NO: 7420 - protein, 10 aa, HUMAN IMMUNODEFICIENCY VIRUS
LLHPICQHGM

SEQ ID NO: 7421 - protein, 10 aa, HUMAN IMMUNODEFICIENCY VIRUS
HMARELHPEY

SEQ ID NO: 7422 - protein, 11 aa, HUMAN IMMUNODEFICIENCY VIRUS
RPQVPLRPMTF

SEQ ID NO: 7423 - protein, 11 aa, HUMAN IMMUNODEFICIENCY VIRUS
CLLHPMSQHGM

SEQ ID NO: 7424 - protein, 11 aa, HUMAN IMMUNODEFICIENCY VIRUS
HMARELHPEYY

SEQ ID NO: 7425 - protein, 10 aa, HUMAN IMMUNODEFICIENCY VIRUS
WQNYTPGPGV

SEQ ID NO: 7426 - protein, 8 aa, HUMAN IMMUNODEFICIENCY VIRUS
VPVDPREV

SEQ ID NO: 7427 - protein, 9 aa, HUMAN IMMUNODEFICIENCY VIRUS
LVPVDPREV

SEQ ID NO: 7428 - protein, 10 aa, HUMAN IMMUNODEFICIENCY VIRUS
KLVPVDPREV

SEQ ID NO: 7429 - protein, 8 aa, HUMAN IMMUNODEFICIENCY VIRUS
PMTYKGAF

SEQ ID NO: 7430 - protein, 8 aa, HUMAN IMMUNODEFICIENCY VIRUS
HPMSQHGM

SEQ ID NO: 7431 - protein, 9 aa, HUMAN IMMUNODEFICIENCY VIRUS
RPMTYKGAF

SEQ ID NO: 7432 - protein, 10 aa, HUMAN IMMUNODEFICIENCY VIRUS
LLHPMSQHGM

SEQ ID NO: 7433 - protein, 11 aa, HUMAN IMMUNODEFICIENCY VIRUS
PLRPMTYKGAF

SEQ ID NO: 7434 - protein, 11 aa, HUMAN IMMUNODEFICIENCY VIRUS
SQKRQDILDLW

SEQ ID NO: 7435 - protein, 8 aa, HUMAN IMMUNODEFICIENCY VIRUS
WVYHTQGF

SEQ ID NO: 7436 - protein, 8 aa, HUMAN IMMUNODEFICIENCY VIRUS
TPGPGTRF

SEQ ID NO: 7437 - protein, 8 aa, HUMAN IMMUNODEFICIENCY VIRUS
GIRYPLTF

SEQ ID NO: 7438 - protein, 9 aa, HUMAN IMMUNODEFICIENCY VIRUS
WVYHTQGFF

SEQ ID NO: 7439 - protein, 10 aa, HUMAN IMMUNODEFICIENCY VIRUS
DLWVYHTQGF

SEQ ID NO: 7440 - protein, 10 aa, HUMAN IMMUNODEFICIENCY VIRUS
GPGIRYPLTF

SEQ ID NO: 7441 - protein, 10 aa, HUMAN IMMUNODEFICIENCY VIRUS
GPGTRFPLTF

SEQ ID NO: 7442 - protein, 10 aa, HUMAN IMMUNODEFICIENCY VIRUS
GIRYPLTFGW

SEQ ID NO: 7443 - protein, 11 aa, HUMAN IMMUNODEFICIENCY VIRUS
DLWVYHTQGFF

SEQ ID NO: 7444 - protein, 8 aa, HUMAN IMMUNODEFICIENCY VIRUS
DLEKHGAI

SEQ ID NO: 7445 - protein, 10 aa, HUMAN IMMUNODEFICIENCY VIRUS
WLEAQEEEEV

SEQ ID NO: 7446 - protein, 9 aa, HUMAN IMMUNODEFICIENCY VIRUS
AQEEEEVGF

SEQ ID NO: 7447 - protein, 11 aa, HUMAN IMMUNODEFICIENCY VIRUS
AQEEEEVGFPV

SEQ ID NO: 7448 - protein, 8 aa, HUMAN IMMUNODEFICIENCY VIRUS
TPGPGIRY

SEQ ID NO: 7449 - protein, 9 aa, HUMAN IMMUNODEFICIENCY VIRUS
FPLTFGWCF

SEQ ID NO: 7450 - protein, 11 aa, HUMAN IMMUNODEFICIENCY VIRUS
TQGFFPDWQNY

SEQ ID NO: 7451 - protein, 10 aa, HUMAN IMMUNODEFICIENCY VIRUS
WQNYTPGPGI

SEQ ID NO: 7452 - protein, 10 aa, HUMAN IMMUNODEFICIENCY VIRUS
LIYSKKRQEI

SEQ ID NO: 7453 - protein, 11 aa, HUMAN IMMUNODEFICIENCY VIRUS
GLIYSKKRQEI

SEQ ID NO: 7454 - protein, 8 aa, HUMAN IMMUNODEFICIENCY VIRUS
DILDLWVY

SEQ ID NO: 7455 - protein, 9 aa, HUMAN IMMUNODEFICIENCY VIRUS
RQDILDLWV

SEQ ID NO: 7456 - protein, 10 aa, HUMAN IMMUNODEFICIENCY VIRUS
RQDILDLWVY

SEQ ID NO: 7457 - protein, 8 aa, HUMAN IMMUNODEFICIENCY VIRUS
WVYHTQGY

SEQ ID NO: 7458 - protein, 9 aa, HUMAN IMMUNODEFICIENCY VIRUS
WVYHTQGYF

SEQ ID NO: 7459 - protein, 10 aa, HUMAN IMMUNODEFICIENCY VIRUS
DLWVYHTQGY

SEQ ID NO: 7460 - protein, 11 aa, HUMAN IMMUNODEFICIENCY VIRUS
DLWVYHTQGYF

SEQ ID NO: 7461 - protein, 8 aa, HUMAN IMMUNODEFICIENCY VIRUS
TQGFFPDW

SEQ ID NO: 7462 - protein, 9 aa, HUMAN IMMUNODEFICIENCY VIRUS
YPLTFGWCF

SEQ ID NO: 7463 - protein, 8 aa, HUMAN IMMUNODEFICIENCY VIRUS
RQDILDLW

SEQ ID NO: 7464 - protein, 10 aa, HUMAN IMMUNODEFICIENCY VIRUS
RQEILDLWVY

SEQ ID NO: 7465 - protein, 8 aa, HUMAN IMMUNODEFICIENCY VIRUS
EILDLWVY

SEQ ID NO: 7466 - protein, 9 aa, HUMAN IMMUNODEFICIENCY VIRUS
RQEILDLWV

SEQ ID NO: 7467 - protein, 11 aa, HUMAN IMMUNODEFICIENCY VIRUS
PLTFGWCFKLV

SEQ ID NO: 7468 - protein, 11 aa, HUMAN IMMUNODEFICIENCY VIRUS
RPQVPLRPMTY

SEQ ID NO: 7469 - protein, 11 aa, HUMAN IMMUNODEFICIENCY VIRUS
TQGYFPDWQNY

SEQ ID NO: 7470 - protein, 8 aa, HUMAN IMMUNODEFICIENCY VIRUS
RQEILDLW

SEQ ID NO: 7471 - protein, 8 aa, HUMAN IMMUNODEFICIENCY VIRUS
TQGYFPDW

SEQ ID NO: 7472 - protein, 10 aa, HUMAN IMMUNODEFICIENCY VIRUS
EVGFPVRPQV

SEQ ID NO: 7473 - protein, 8 aa, HUMAN IMMUNODEFICIENCY VIRUS
PLTFGWCF

SEQ ID NO: 7474 - protein, 10 aa, HUMAN IMMUNODEFICIENCY VIRUS
PQVPLRPMTY

SEQ ID NO: 7475 - protein, 8 aa, HUMAN IMMUNODEFICIENCY VIRUS
VPLRPMTY

SEQ ID NO: 7476 - protein, 9 aa, HUMAN IMMUNODEFICIENCY VIRUS
QVPLRPMTY

SEQ ID NO: 7477 - protein, 9 aa, HUMAN IMMUNODEFICIENCY VIRUS
RPQVPLRPM

SEQ ID NO: 7478 - protein, 11 aa, HUMAN IMMUNODEFICIENCY VIRUS
PVRPQVPLRPM

SEQ ID NO: 7479 - protein, 8 aa, HUMAN IMMUNODEFICIENCY VIRUS
PQVPLRPM

SEQ ID NO: 7480 - protein, 9 aa, HUMAN IMMUNODEFICIENCY VIRUS
SPTSRELQV

SEQ ID NO: 7481 - protein, 9 aa, HUMAN IMMUNODEFICIENCY VIRUS
AISLSLPQI

SEQ ID NO: 7482 - protein, 9 aa, HUMAN IMMUNODEFICIENCY VIRUS
SPSSRELQV

SEQ ID NO: 7483 - protein, 8 aa, HUMAN IMMUNODEFICIENCY VIRUS
GPERALSV

SEQ ID NO: 7484 - protein, 9 aa, HUMAN IMMUNODEFICIENCY VIRUS
VPTFNFPQI

SEQ ID NO: 7485 - protein, 10 aa, HUMAN IMMUNODEFICIENCY VIRUS
EPGEDRELSV

SEQ ID NO: 7486 - protein, 11 aa, HUMAN IMMUNODEFICIENCY VIRUS
GQRQGTVSLSF

SEQ ID NO: 7487 - protein, 8 aa, HUMAN IMMUNODEFICIENCY VIRUS
PQGEAREF

SEQ ID NO: 7488 - protein, 9 aa, HUMAN IMMUNODEFICIENCY VIRUS
FPQGEAREF

SEQ ID NO: 7489 - protein, 10 aa, HUMAN IMMUNODEFICIENCY VIRUS
LIEICGHKAI

SEQ ID NO: 7490 - protein, 10 aa, HUMAN IMMUNODEFICIENCY VIRUS
AVQKIATESI

SEQ ID NO: 7491 - protein, 11 aa, HUMAN IMMUNODEFICIENCY VIRUS
MLTQLGCTLNF

SEQ ID NO: 7492 - protein, 11 aa, HUMAN IMMUNODEFICIENCY VIRUS
AVQKIATESIV

SEQ ID NO: 7493 - protein, 11 aa, HUMAN IMMUNODEFICIENCY VIRUS
AVKAACWWAGI

SEQ ID NO: 7494 - protein, 11 aa, HUMAN IMMUNODEFICIENCY VIRUS
IQTKELQKQII

SEQ ID NO: 7495 - protein, 8 aa, HUMAN IMMUNODEFICIENCY VIRUS
RIGPENPY

SEQ ID NO: 7496 - protein, 8 aa, HUMAN IMMUNODEFICIENCY VIRUS
YQLETEPI

SEQ ID NO: 7497 - protein, 8 aa, HUMAN IMMUNODEFICIENCY VIRUS
AQEDHEKY

SEQ ID NO: 7498 - protein, 8 aa, HUMAN IMMUNODEFICIENCY VIRUS
GIQQEFGI

SEQ ID NO: 7499 - protein, 8 aa, HUMAN IMMUNODEFICIENCY VIRUS
KVVPRRKV

SEQ ID NO: 7500 - protein, 8 aa, HUMAN IMMUNODEFICIENCY VIRUS
VPRRKVKI

SEQ ID NO: 7501 - protein, 9 aa, HUMAN IMMUNODEFICIENCY VIRUS
VVPRRKVKI

SEQ ID NO: 7502 - protein, 9 aa, HUMAN IMMUNODEFICIENCY VIRUS
VPRRKVKII

SEQ ID NO: 7503 - protein, 9 aa, HUMAN IMMUNODEFICIENCY VIRUS
IIKDYGKQM

SEQ ID NO: 7504 - protein, 10 aa, HUMAN IMMUNODEFICIENCY VIRUS
GIQQEFGIPY

SEQ ID NO: 7505 - protein, 10 aa, HUMAN IMMUNODEFICIENCY VIRUS
KVVPRRKVKI

SEQ ID NO: 7506 - protein, 10 aa, HUMAN IMMUNODEFICIENCY VIRUS
VVPRRKVKII

SEQ ID NO: 7507 - protein, 10 aa, HUMAN IMMUNODEFICIENCY VIRUS
KIIKDYGKQM

SEQ ID NO: 7508 - protein, 11 aa, HUMAN IMMUNODEFICIENCY VIRUS
KISRIGPENPY

SEQ ID NO: 7509 - protein, 11 aa, HUMAN IMMUNODEFICIENCY VIRUS
IPSTNNETPGI

SEQ ID NO: 7510 - protein, 11 aa, HUMAN IMMUNODEFICIENCY VIRUS
KLWYQLETEPI

SEQ ID NO: 7511 - protein, 11 aa, HUMAN IMMUNODEFICIENCY VIRUS
KVVPRRKVKII

SEQ ID NO: 7512 - protein, 9 aa, HUMAN IMMUNODEFICIENCY VIRUS
KQIIKIQNF

SEQ ID NO: 7513 - protein, 9 aa, HUMAN IMMUNODEFICIENCY VIRUS
IIKIQNFRV

SEQ ID NO: 7514 - protein, 10 aa, HUMAN IMMUNODEFICIENCY VIRUS
IIKIQNFRVY

SEQ ID NO: 7515 - protein, 11 aa, HUMAN IMMUNODEFICIENCY VIRUS
KQIIKIQNFRV

SEQ ID NO: 7516 - protein, 11 aa, HUMAN IMMUNODEFICIENCY VIRUS
IIKIQNFRVYY

SEQ ID NO: 7517 - protein, 8 aa, HUMAN IMMUNODEFICIENCY VIRUS
RPLVTVKI

SEQ ID NO: 7518 - protein, 8 aa, HUMAN IMMUNODEFICIENCY VIRUS
EINLPGKW

SEQ ID NO: 7519 - protein, 8 aa, HUMAN IMMUNODEFICIENCY VIRUS
QIIKIQNF

SEQ ID NO: 7520 - protein, 8 aa, HUMAN IMMUNODEFICIENCY VIRUS
VIQDNSEI

SEQ ID NO: 7521 - protein, 9 aa, HUMAN IMMUNODEFICIENCY VIRUS
RQHLLRWGF

SEQ ID NO: 7522 - protein, 9 aa, HUMAN IMMUNODEFICIENCY VIRUS
NQKTELHAI

SEQ ID NO: 7523 - protein, 9 aa, HUMAN IMMUNODEFICIENCY VIRUS
IIDIIASDI

SEQ ID NO: 7524 - protein, 9 aa, HUMAN IMMUNODEFICIENCY VIRUS
IVDIIATDI

SEQ ID NO: 7525 - protein, 9 aa, HUMAN IMMUNODEFICIENCY VIRUS
VVIQDNSEI

SEQ ID NO: 7526 - protein, 9 aa, HUMAN IMMUNODEFICIENCY VIRUS
IQDNSEIKV

SEQ ID NO: 7527 - protein, 10 aa, HUMAN IMMUNODEFICIENCY VIRUS
WQRPLVTVKI

SEQ ID NO: 7528 - protein, 10 aa, HUMAN IMMUNODEFICIENCY VIRUS
RQYDQIPIEI

SEQ ID NO: 7529 - protein, 10 aa, HUMAN IMMUNODEFICIENCY VIRUS
GQDQWTYQIY

SEQ ID NO: 7530 - protein, 10 aa, HUMAN IMMUNODEFICIENCY VIRUS
RMRGAHTNDV

SEQ ID NO: 7531 - protein, 10 aa, HUMAN IMMUNODEFICIENCY VIRUS
NQKTELQAIY

SEQ ID NO: 7532 - protein, 10 aa, HUMAN IMMUNODEFICIENCY VIRUS
RIIDIIASDI

SEQ ID NO: 7533 - protein, 10 aa, HUMAN IMMUNODEFICIENCY VIRUS
RIVDIIATDI

SEQ ID NO: 7534 - protein, 10 aa, HUMAN IMMUNODEFICIENCY VIRUS
QIIKIQNFRV

SEQ ID NO: 7535 - protein, 10 aa, HUMAN IMMUNODEFICIENCY VIRUS
AVVIQDNSEI

SEQ ID NO: 7536 - protein, 10 aa, HUMAN IMMUNODEFICIENCY VIRUS
VIQDNSEIKV

SEQ ID NO: 7537 - protein, 10 aa, HUMAN IMMUNODEFICIENCY VIRUS
IQDNSEIKVV

SEQ ID NO: 7538 - protein, 11 aa, HUMAN IMMUNODEFICIENCY VIRUS
VLEEINLPGKW

SEQ ID NO: 7539 - protein, 11 aa, HUMAN IMMUNODEFICIENCY VIRUS
ELRQHLLRWGF

SEQ ID NO: 7540 - protein, 11 aa, HUMAN IMMUNODEFICIENCY VIRUS
HPDKWTVQPIV

SEQ ID NO: 7541 - protein, 11 aa, HUMAN IMMUNODEFICIENCY VIRUS
IQKQGQDQWTY

SEQ ID NO: 7542 - protein, 11 aa, HUMAN IMMUNODEFICIENCY VIRUS
LQKQIIKIQNF

SEQ ID NO: 7543 - protein, 11 aa, HUMAN IMMUNODEFICIENCY VIRUS
QIIKIQNFRVY

SEQ ID NO: 7544 - protein, 11 aa, HUMAN IMMUNODEFICIENCY VIRUS
VVIQDNSEIKV

SEQ ID NO: 7545 - protein, 11 aa, HUMAN IMMUNODEFICIENCY VIRUS
VIQDNSEIKVV

SEQ ID NO: 7546 - protein, 9 aa, HUMAN IMMUNODEFICIENCY VIRUS
ELQKQIIKI

SEQ ID NO: 7547 - protein, 10 aa, HUMAN IMMUNODEFICIENCY VIRUS
NLKTGKYARM

SEQ ID NO: 7548 - protein, 8 aa, HUMAN IMMUNODEFICIENCY VIRUS
DINLPGKW

SEQ ID NO: 7549 - protein, 8 aa, HUMAN IMMUNODEFICIENCY VIRUS
RQYDQIPI

SEQ ID NO: 7550 - protein, 8 aa, HUMAN IMMUNODEFICIENCY VIRUS
QLPEKDSW

SEQ ID NO: 7551 - protein, 8 aa, HUMAN IMMUNODEFICIENCY VIRUS
VLPEKDSW

SEQ ID NO: 7552 - protein, 8 aa, HUMAN IMMUNODEFICIENCY VIRUS
LQKQIIKI

SEQ ID NO: 7553 - protein, 9 aa, HUMAN IMMUNODEFICIENCY VIRUS
IQLPEKDSW

SEQ ID NO: 7554 - protein, 9 aa, HUMAN IMMUNODEFICIENCY VIRUS
IVLPEKDSW

SEQ ID NO: 7555 - protein, 9 aa, HUMAN IMMUNODEFICIENCY VIRUS
IQKQGQDQW

SEQ ID NO: 7556 - protein, 9 aa, HUMAN IMMUNODEFICIENCY VIRUS
GQDQWTYQI

SEQ ID NO: 7557 - protein, 10 aa, HUMAN IMMUNODEFICIENCY VIRUS
SPTRRELQVW

SEQ ID NO: 7558 - protein, 10 aa, HUMAN IMMUNODEFICIENCY VIRUS
KVRQYDQIPI

SEQ ID NO: 7559 - protein, 10 aa, HUMAN IMMUNODEFICIENCY VIRUS
LIEICGKKAI

SEQ ID NO: 7560 - protein, 10 aa, HUMAN IMMUNODEFICIENCY VIRUS
PIQLPEKDSW

SEQ ID NO: 7561 - protein, 10 aa, HUMAN IMMUNODEFICIENCY VIRUS
PIVLPEKDSW

SEQ ID NO: 7562 - protein, 10 aa, HUMAN IMMUNODEFICIENCY VIRUS
QLPEKDSWTV

SEQ ID NO: 7563 - protein, 10 aa, HUMAN IMMUNODEFICIENCY VIRUS
VLPEKDSWTV

SEQ ID NO: 7564 - protein, 10 aa, HUMAN IMMUNODEFICIENCY VIRUS
EIQKQGQDQW

SEQ ID NO: 7565 - protein, 10 aa, HUMAN IMMUNODEFICIENCY VIRUS
EQAEHLKTAV

SEQ ID NO: 7566 - protein, 11 aa, HUMAN IMMUNODEFICIENCY VIRUS
VLEDINLPGKW

SEQ ID NO: 7567 - protein, 11 aa, HUMAN IMMUNODEFICIENCY VIRUS
ILIEICGKKAI

SEQ ID NO: 7568 - protein, 11 aa, HUMAN IMMUNODEFICIENCY VIRUS
QPIQLPEKDSW

SEQ ID NO: 7569 - protein, 11 aa, HUMAN IMMUNODEFICIENCY VIRUS
QPIVLPEKDSW

SEQ ID NO: 7570 - protein, 11 aa, HUMAN IMMUNODEFICIENCY VIRUS
IQLPEKDSWTV

SEQ ID NO: 7571 - protein, 11 aa, HUMAN IMMUNODEFICIENCY VIRUS
IVLPEKDSWTV

SEQ ID NO: 7572 - protein, 11 aa, HUMAN IMMUNODEFICIENCY VIRUS
KQGQDQWTYQI

SEQ ID NO: 7573 - protein, 11 aa, HUMAN IMMUNODEFICIENCY VIRUS
LIKKEKVYLSW

SEQ ID NO: 7574 - protein, 11 aa, HUMAN IMMUNODEFICIENCY VIRUS
KLAGRWPVKTI

SEQ ID NO: 7575 - protein, 8 aa, HUMAN IMMUNODEFICIENCY VIRUS
RPLVTIKI

SEQ ID NO: 7576 - protein, 8 aa, HUMAN IMMUNODEFICIENCY VIRUS
KQNPDIVI

SEQ ID NO: 7577 - protein, 8 aa, HUMAN IMMUNODEFICIENCY VIRUS
KIATESIV

SEQ ID NO: 7578 - protein, 8 aa, HUMAN IMMUNODEFICIENCY VIRUS
YQLEKDPI

SEQ ID NO: 7579 - protein, 9 aa, HUMAN IMMUNODEFICIENCY VIRUS
SPTRRELQV

SEQ ID NO: 7580 - protein, 9 aa, HUMAN IMMUNODEFICIENCY VIRUS
KQNPDIVIY

SEQ ID NO: 7581 - protein, 9 aa, HUMAN IMMUNODEFICIENCY VIRUS
VQKIATESI

SEQ ID NO: 7582 - protein, 9 aa, HUMAN IMMUNODEFICIENCY VIRUS
KIATESIVI

SEQ ID NO: 7583 - protein, 10 aa, HUMAN IMMUNODEFICIENCY VIRUS
WQRPLVTIKI

SEQ ID NO: 7584 - protein, 10 aa, HUMAN IMMUNODEFICIENCY VIRUS
VQKIATESIV

SEQ ID NO: 7585 - protein, 10 aa, HUMAN IMMUNODEFICIENCY VIRUS
KIATESIVIW

SEQ ID NO: 7586 - protein, 10 aa, HUMAN IMMUNODEFICIENCY VIRUS
TIHTDNGSNF

SEQ ID NO: 7587 - protein, 11 aa, HUMAN IMMUNODEFICIENCY VIRUS
EPFRKQNPDIV

SEQ ID NO: 7588 - protein, 11 aa, HUMAN IMMUNODEFICIENCY VIRUS
KQNPDIVIYQY

SEQ ID NO: 7589 - protein, 11 aa, HUMAN IMMUNODEFICIENCY VIRUS
ELREHLLKWGF

SEQ ID NO: 7590 - protein, 11 aa, HUMAN IMMUNODEFICIENCY VIRUS
VQKIATESIVI

SEQ ID NO: 7591 - protein, 11 aa, HUMAN IMMUNODEFICIENCY VIRUS
KLWYQLEKDPI

SEQ ID NO: 7592 - protein, 8 aa, HUMAN IMMUNODEFICIENCY VIRUS
LVEICTEM

SEQ ID NO: 7593 - protein, 8 aa, HUMAN IMMUNODEFICIENCY VIRUS
KIKALVEI

SEQ ID NO: 7594 - protein, 9 aa, HUMAN IMMUNODEFICIENCY VIRUS
TQLGCTLNF

SEQ ID NO: 7595 - protein, 9 aa, HUMAN IMMUNODEFICIENCY VIRUS
ALVEICTEM

SEQ ID NO: 7596 - protein, 9 aa, HUMAN IMMUNODEFICIENCY VIRUS
ELRQHLLRW

SEQ ID NO: 7597 - protein, 9 aa, HUMAN IMMUNODEFICIENCY VIRUS
IQKQGQGQW

SEQ ID NO: 7598 - protein, 9 aa, HUMAN IMMUNODEFICIENCY VIRUS
KQGQDQWTY

SEQ ID NO: 7599 - protein, 9 aa, HUMAN IMMUNODEFICIENCY VIRUS
IQKETWEAW

SEQ ID NO: 7600 - protein, 9 aa, HUMAN IMMUNODEFICIENCY VIRUS
LVSAGIRKV

SEQ ID NO: 7601 - protein, 10 aa, HUMAN IMMUNODEFICIENCY VIRUS
LPGRWKPKMI

SEQ ID NO: 7602 - protein, 10 aa, HUMAN IMMUNODEFICIENCY VIRUS
EIQKQGQGQW

SEQ ID NO: 7603 - protein, 10 aa, HUMAN IMMUNODEFICIENCY VIRUS
PIQKETWEAW

SEQ ID NO: 7604 - protein, 10 aa, HUMAN IMMUNODEFICIENCY VIRUS
IQKETWEAWW

SEQ ID NO: 7605 - protein, 10 aa, HUMAN IMMUNODEFICIENCY VIRUS
QVDKLVSAGI

SEQ ID NO: 7606 - protein, 10 aa, HUMAN IMMUNODEFICIENCY VIRUS
KLVSAGIRKV

SEQ ID NO: 7607 - protein, 11 aa, HUMAN IMMUNODEFICIENCY VIRUS
TQLGCTLNFPI

SEQ ID NO: 7608 - protein, 11 aa, HUMAN IMMUNODEFICIENCY VIRUS
PLTEEKIKALV

SEQ ID NO: 7609 - protein, 11 aa, HUMAN IMMUNODEFICIENCY VIRUS
IQKQGQGQWTY

SEQ ID NO: 7610 - protein, 11 aa, HUMAN IMMUNODEFICIENCY VIRUS
LPIQKETWEAW

SEQ ID NO: 7611 - protein, 11 aa, HUMAN IMMUNODEFICIENCY VIRUS
PIQKETWEAWW

SEQ ID NO: 7612 - protein, 11 aa, HUMAN IMMUNODEFICIENCY VIRUS
HLALQDSGLEV

SEQ ID NO: 7613 - protein, 11 aa, HUMAN IMMUNODEFICIENCY VIRUS
EQVDKLVSAGI

SEQ ID NO: 7614 - protein, 11 aa, HUMAN IMMUNODEFICIENCY VIRUS
LVSAGIRKVLF

SEQ ID NO: 7615 - protein, 8 aa, HUMAN IMMUNODEFICIENCY VIRUS
QLGCTLNF

SEQ ID NO: 7616 - protein, 8 aa, HUMAN IMMUNODEFICIENCY VIRUS
QLEKEPIV

SEQ ID NO: 7617 - protein, 8 aa, HUMAN IMMUNODEFICIENCY VIRUS
AQEEHERY

SEQ ID NO: 7618 - protein, 9 aa, HUMAN IMMUNODEFICIENCY VIRUS
LPGRWKPKM

SEQ ID NO: 7619 - protein, 9 aa, HUMAN IMMUNODEFICIENCY VIRUS
YQLEKEPIV

SEQ ID NO: 7620 - protein, 9 aa, HUMAN IMMUNODEFICIENCY VIRUS
IQQEFGIPY

SEQ ID NO: 7621 - protein, 10 aa, HUMAN IMMUNODEFICIENCY VIRUS
QLGCTLNFPI

SEQ ID NO: 7622 - protein, 10 aa, HUMAN IMMUNODEFICIENCY VIRUS
EPFRKQNPDI

SEQ ID NO: 7623 - protein, 8 aa, HUMAN IMMUNODEFICIENCY VIRUS
TPKFKLPI

SEQ ID NO: 7624 - protein, 9 aa, HUMAN IMMUNODEFICIENCY VIRUS
NPDIVIYQY

SEQ ID NO: 7625 - protein, 9 aa, HUMAN IMMUNODEFICIENCY VIRUS
ELREHLLKW

SEQ ID NO: 7626 - protein, 10 aa, HUMAN IMMUNODEFICIENCY VIRUS
NPDIVIYQYM

SEQ ID NO: 7627 - protein, 11 aa, HUMAN IMMUNODEFICIENCY VIRUS
MLTQIGCTLNF

SEQ ID NO: 7628 - protein, 10 aa, HUMAN IMMUNODEFICIENCY VIRUS
NLKTGKYAKM

SEQ ID NO: 7629 - protein, 8 aa, HUMAN IMMUNODEFICIENCY VIRUS
SVPLDKDF

SEQ ID NO: 7630 - protein, 8 aa, HUMAN IMMUNODEFICIENCY VIRUS
DIVIYQYM

SEQ ID NO: 7631 - protein, 10 aa, HUMAN IMMUNODEFICIENCY VIRUS
TLWQRPLVTV

SEQ ID NO: 7632 - protein, 10 aa, HUMAN IMMUNODEFICIENCY VIRUS
IIGRNMLTQI

SEQ ID NO: 7633 - protein, 10 aa, HUMAN IMMUNODEFICIENCY VIRUS
VPLDKDFRKY

SEQ ID NO: 7634 - protein, 11 aa, HUMAN IMMUNODEFICIENCY VIRUS
NIIGRNMLTQI

SEQ ID NO: 7635 - protein, 11 aa, HUMAN IMMUNODEFICIENCY VIRUS
SVPLDKDFRKY

SEQ ID NO: 7636 - protein, 11 aa, HUMAN IMMUNODEFICIENCY VIRUS
LLRGTKALTEV

SEQ ID NO: 7637 - protein, 11 aa, HUMAN IMMUNODEFICIENCY VIRUS
ELVNQIIEQLI

SEQ ID NO: 7638 - protein, 11 aa, HUMAN IMMUNODEFICIENCY VIRUS
AMASDFNLPPI

SEQ ID NO: 7639 - protein, 11 aa, HUMAN IMMUNODEFICIENCY VIRUS
PLWKGPAKLLW

SEQ ID NO: 7640 - protein, 9 aa, HUMAN IMMUNODEFICIENCY VIRUS
PLDKDFRKY

SEQ ID NO: 7641 - protein, 8 aa, HUMAN IMMUNODEFICIENCY VIRUS
WQRPLVTV

SEQ ID NO: 7642 - protein, 8 aa, HUMAN IMMUNODEFICIENCY VIRUS
EICGHKAI

SEQ ID NO: 7643 - protein, 10 aa, HUMAN IMMUNODEFICIENCY VIRUS
LVNQIIEQLI

SEQ ID NO: 7644 - protein, 10 aa, HUMAN IMMUNODEFICIENCY VIRUS
LVSQIIEQLI

SEQ ID NO: 7645 - protein, 11 aa, HUMAN IMMUNODEFICIENCY VIRUS
EICGHKAIGTV

SEQ ID NO: 7646 - protein, 11 aa, HUMAN IMMUNODEFICIENCY VIRUS
ELVSQIIEQLI

SEQ ID NO: 7647 - protein, 8 aa, HUMAN IMMUNODEFICIENCY VIRUS
QQEFGIPY

SEQ ID NO: 7648 - protein, 8 aa, HUMAN IMMUNODEFICIENCY VIRUS
RQYDQILI

SEQ ID NO: 7649 - protein, 8 aa, HUMAN IMMUNODEFICIENCY VIRUS
SQIIEQLI

SEQ ID NO: 7650 - protein, 9 aa, HUMAN IMMUNODEFICIENCY VIRUS
KLPIQKETW

SEQ ID NO: 7651 - protein, 10 aa, HUMAN IMMUNODEFICIENCY VIRUS
KVRQYDQILI

SEQ ID NO: 7652 - protein, 10 aa, HUMAN IMMUNODEFICIENCY VIRUS
RQYDQILIEI

SEQ ID NO: 7653 - protein, 11 aa, HUMAN IMMUNODEFICIENCY VIRUS
DLEIGQHRTKI

SEQ ID NO: 7654 - protein, 11 aa, HUMAN IMMUNODEFICIENCY VIRUS
LIKKEKVYLAW

SEQ ID NO: 7655 - protein, 11 aa, HUMAN IMMUNODEFICIENCY VIRUS
TVKAACWWAGI

SEQ ID NO: 7656 - protein, 11 aa, HUMAN IMMUNODEFICIENCY VIRUS
KVIHTDNGSNF

SEQ ID NO: 7657 - protein, 8 aa, HUMAN IMMUNODEFICIENCY VIRUS
WQRPLVTI

SEQ ID NO: 7658 - protein, 9 aa, HUMAN IMMUNODEFICIENCY VIRUS
EIGQHRTKI

SEQ ID NO: 7659 - protein, 9 aa, HUMAN IMMUNODEFICIENCY VIRUS
EPIVGAETF

SEQ ID NO: 7660 - protein, 10 aa, HUMAN IMMUNODEFICIENCY VIRUS
TLWQRPLVTI

SEQ ID NO: 7661 - protein, 10 aa, HUMAN IMMUNODEFICIENCY VIRUS
IIGRNLLTQI

SEQ ID NO: 7662 - protein, 10 aa, HUMAN IMMUNODEFICIENCY VIRUS
EPIVGAETFY

SEQ ID NO: 7663 - protein, 11 aa, HUMAN IMMUNODEFICIENCY VIRUS
NIIGRNLLTQI

SEQ ID NO: 7664 - protein, 11 aa, HUMAN IMMUNODEFICIENCY VIRUS
LLTQIGCTLNF

SEQ ID NO: 7665 - protein, 11 aa, HUMAN IMMUNODEFICIENCY VIRUS
EPIVGAETFYV

SEQ ID NO: 7666 - protein, 8 aa, HUMAN IMMUNODEFICIENCY VIRUS
DQWTYQIY

SEQ ID NO: 7667 - protein, 8 aa, HUMAN IMMUNODEFICIENCY VIRUS
GIKQEFGI

SEQ ID NO: 7668 - protein, 10 aa, HUMAN IMMUNODEFICIENCY VIRUS
GIKQEFGIPY

SEQ ID NO: 7669 - protein, 11 aa, HUMAN IMMUNODEFICIENCY VIRUS
LLRGAKALTDI

SEQ ID NO: 7670 - protein, 11 aa, HUMAN IMMUNODEFICIENCY VIRUS
YLAWVPAHKGI

SEQ ID NO: 7671 - protein, 11 aa, HUMAN IMMUNODEFICIENCY VIRUS
KLAGRWPVKVI

SEQ ID NO: 7672 - protein, 9 aa, HUMAN IMMUNODEFICIENCY VIRUS
NPEIVIYQY

SEQ ID NO: 7673 - protein, 9 aa, HUMAN IMMUNODEFICIENCY VIRUS
HLEGKVILV

SEQ ID NO: 7674 - protein, 9 aa, HUMAN IMMUNODEFICIENCY VIRUS
KVILVAVHV

SEQ ID NO: 7675 - protein, 10 aa, HUMAN IMMUNODEFICIENCY VIRUS
NPEIVIYQYM

SEQ ID NO: 7676 - protein, 11 aa, HUMAN IMMUNODEFICIENCY VIRUS
EICGKKAIGTV

SEQ ID NO: 7677 - protein, 11 aa, HUMAN IMMUNODEFICIENCY VIRUS
HLEGKVILVAV

SEQ ID NO: 7678 - protein, 8 aa, HUMAN IMMUNODEFICIENCY VIRUS
EICGKKAI

SEQ ID NO: 7679 - protein, 8 aa, HUMAN IMMUNODEFICIENCY VIRUS
NPYNTPIF

SEQ ID NO: 7680 - protein, 8 aa, HUMAN IMMUNODEFICIENCY VIRUS
EIVIYQYM

SEQ ID NO: 7681 - protein, 8 aa, HUMAN IMMUNODEFICIENCY VIRUS
NQIIEQLI

SEQ ID NO: 7682 - protein, 8 aa, HUMAN IMMUNODEFICIENCY VIRUS
VILVAVHV

SEQ ID NO: 7683 - protein, 8 aa, HUMAN IMMUNODEFICIENCY VIRUS
TVKAACWW

SEQ ID NO: 7684 - protein, 9 aa, HUMAN IMMUNODEFICIENCY VIRUS
PVNIIGRNM

SEQ ID NO: 7685 - protein, 10 aa, HUMAN IMMUNODEFICIENCY VIRUS
TPVNIIGRNM

SEQ ID NO: 7686 - protein, 10 aa, HUMAN IMMUNODEFICIENCY VIRUS
GPENPYNTPI

SEQ ID NO: 7687 - protein, 10 aa, HUMAN IMMUNODEFICIENCY VIRUS
NPYNTPIFAI

SEQ ID NO: 7688 - protein, 10 aa, HUMAN IMMUNODEFICIENCY VIRUS
GQGQWTYQIY

SEQ ID NO: 7689 - protein, 10 aa, HUMAN IMMUNODEFICIENCY VIRUS
VIHTDNGSNF

SEQ ID NO: 7690 - protein, 11 aa, HUMAN IMMUNODEFICIENCY VIRUS
GPENPYNTPIF

SEQ ID NO: 7691 - protein, 8 aa, HUMAN IMMUNODEFICIENCY VIRUS
LQDSGSEV

SEQ ID NO: 7692 - protein, 8 aa, HUMAN IMMUNODEFICIENCY VIRUS
LLKLAGRW

SEQ ID NO: 7693 - protein, 9 aa, HUMAN IMMUNODEFICIENCY VIRUS
KQGQGQWTY

SEQ ID NO: 7694 - protein, 9 aa, HUMAN IMMUNODEFICIENCY VIRUS
GQGQWTYQI

SEQ ID NO: 7695 - protein, 9 aa, HUMAN IMMUNODEFICIENCY VIRUS
ALQDSGSEV

SEQ ID NO: 7696 - protein, 9 aa, HUMAN IMMUNODEFICIENCY VIRUS
FLLKLAGRW

SEQ ID NO: 7697 - protein, 10 aa, HUMAN IMMUNODEFICIENCY VIRUS
LQDSGSEVNI

SEQ ID NO: 7698 - protein, 10 aa, HUMAN IMMUNODEFICIENCY VIRUS
LLKLAGRWPV

SEQ ID NO: 7699 - protein, 11 aa, HUMAN IMMUNODEFICIENCY VIRUS
KQGQGQWTYQI

SEQ ID NO: 7700 - protein, 11 aa, HUMAN IMMUNODEFICIENCY VIRUS
ALQDSGSEVNI

SEQ ID NO: 7701 - protein, 11 aa, HUMAN IMMUNODEFICIENCY VIRUS
LQDSGSEVNIV

SEQ ID NO: 7702 - protein, 11 aa, HUMAN IMMUNODEFICIENCY VIRUS
AMASDFNLPPV

SEQ ID NO: 7703 - protein, 11 aa, HUMAN IMMUNODEFICIENCY VIRUS
FLLKLAGRWPV

SEQ ID NO: 7704 - protein, 11 aa, HUMAN IMMUNODEFICIENCY VIRUS
QLDCTHLEGKV

SEQ ID NO: 7705 - protein, 8 aa, HUMAN IMMUNODEFICIENCY VIRUS
PIVAKEIV

SEQ ID NO: 7706 - protein, 9 aa, HUMAN IMMUNODEFICIENCY VIRUS
EIGQHRAKI

SEQ ID NO: 7707 - protein, 9 aa, HUMAN IMMUNODEFICIENCY VIRUS
RLPIQKETW

SEQ ID NO: 7708 - protein, 9 aa, HUMAN IMMUNODEFICIENCY VIRUS
LVSSGIRKV

SEQ ID NO: 7709 - protein, 9 aa, HUMAN IMMUNODEFICIENCY VIRUS
PPIVAKEIV

SEQ ID NO: 7710 - protein, 10 aa, HUMAN IMMUNODEFICIENCY VIRUS
DPSKDLIAEI

SEQ ID NO: 7711 - protein, 10 aa, HUMAN IMMUNODEFICIENCY VIRUS
KLVSSGIRKV

SEQ ID NO: 7712 - protein, 10 aa, HUMAN IMMUNODEFICIENCY VIRUS
NLPPIVAKEI

SEQ ID NO: 7713 - protein, 10 aa, HUMAN IMMUNODEFICIENCY VIRUS
LPPIVAKEIV

SEQ ID NO: 7714 - protein, 11 aa, HUMAN IMMUNODEFICIENCY VIRUS
DLEIGQHRAKI

SEQ ID NO: 7715 - protein, 11 aa, HUMAN IMMUNODEFICIENCY VIRUS
LVSSGIRKVLF

SEQ ID NO: 7716 - protein, 11 aa, HUMAN IMMUNODEFICIENCY VIRUS
NLPPIVAKEIV

SEQ ID NO: 7717 - protein, 8 aa, HUMAN IMMUNODEFICIENCY VIRUS
QIYAGIKV

SEQ ID NO: 7718 - protein, 8 aa, HUMAN IMMUNODEFICIENCY VIRUS
QIYPGIKV

SEQ ID NO: 7719 - protein, 8 aa, HUMAN IMMUNODEFICIENCY VIRUS
LQDSGLEV

SEQ ID NO: 7720 - protein, 8 aa, HUMAN IMMUNODEFICIENCY VIRUS
AQEEHEKY

SEQ ID NO: 7721 - protein, 8 aa, HUMAN IMMUNODEFICIENCY VIRUS
PPIVAKEI

SEQ ID NO: 7722 - protein, 9 aa, HUMAN IMMUNODEFICIENCY VIRUS
SQIYAGIKV

SEQ ID NO: 7723 - protein, 9 aa, HUMAN IMMUNODEFICIENCY VIRUS
SQIYPGIKV

SEQ ID NO: 7724 - protein, 9 aa, HUMAN IMMUNODEFICIENCY VIRUS
IQKETWETW

SEQ ID NO: 7725 - protein, 9 aa, HUMAN IMMUNODEFICIENCY VIRUS
ALQDSGLEV

SEQ ID NO: 7726 - protein, 9 aa, HUMAN IMMUNODEFICIENCY VIRUS
LPPIVAKEI

SEQ ID NO: 7727 - protein, 10 aa, HUMAN IMMUNODEFICIENCY VIRUS
PIQKETWETW

SEQ ID NO: 7728 - protein, 10 aa, HUMAN IMMUNODEFICIENCY VIRUS
IQKETWETWW

SEQ ID NO: 7729 - protein, 10 aa, HUMAN IMMUNODEFICIENCY VIRUS
LQDSGLEVNI

SEQ ID NO: 7730 - protein, 10 aa, HUMAN IMMUNODEFICIENCY VIRUS
NLPPVVAKEI

SEQ ID NO: 7731 - protein, 10 aa, HUMAN IMMUNODEFICIENCY VIRUS
LPPVVAKEIV

SEQ ID NO: 7732 - protein, 11 aa, HUMAN IMMUNODEFICIENCY VIRUS
LPIQKETWETW

SEQ ID NO: 7733 - protein, 11 aa, HUMAN IMMUNODEFICIENCY VIRUS
PIQKETWETWW

SEQ ID NO: 7734 - protein, 11 aa, HUMAN IMMUNODEFICIENCY VIRUS
YVTDRGRQKVV

SEQ ID NO: 7735 - protein, 11 aa, HUMAN IMMUNODEFICIENCY VIRUS
ALQDSGLEVNI

SEQ ID NO: 7736 - protein, 11 aa, HUMAN IMMUNODEFICIENCY VIRUS
LQDSGLEVNIV

SEQ ID NO: 7737 - protein, 11 aa, HUMAN IMMUNODEFICIENCY VIRUS
NLPPVVAKEIV

SEQ ID NO: 7738 - protein, 8 aa, HUMAN IMMUNODEFICIENCY VIRUS
KQEFGIPY

SEQ ID NO: 7739 - protein, 8 aa, HUMAN IMMUNODEFICIENCY VIRUS
KIKALTEI

SEQ ID NO: 7740 - protein, 8 aa, HUMAN IMMUNODEFICIENCY VIRUS
PIVGAETF

SEQ ID NO: 7741 - protein, 8 aa, HUMAN IMMUNODEFICIENCY VIRUS
IVGAETFY

SEQ ID NO: 7742 - protein, 8 aa, HUMAN IMMUNODEFICIENCY VIRUS
QLIKKEKV

SEQ ID NO: 7743 - protein, 8 aa, HUMAN IMMUNODEFICIENCY VIRUS
PVVAKEIV

SEQ ID NO: 7744 - protein, 9 aa, HUMAN IMMUNODEFICIENCY VIRUS
PIVGAETFY

SEQ ID NO: 7745 - protein, 9 aa, HUMAN IMMUNODEFICIENCY VIRUS
IVGAETFYV

SEQ ID NO: 7746 - protein, 9 aa, HUMAN IMMUNODEFICIENCY VIRUS
EQLIKKEKV

SEQ ID NO: 7747 - protein, 9 aa, HUMAN IMMUNODEFICIENCY VIRUS
QLIKKEKVY

SEQ ID NO: 7748 - protein, 9 aa, HUMAN IMMUNODEFICIENCY VIRUS
LPPVVAKEI

SEQ ID NO: 7749 - protein, 9 aa, HUMAN IMMUNODEFICIENCY VIRUS
PPVVAKEIV

SEQ ID NO: 7750 - protein, 10 aa, HUMAN IMMUNODEFICIENCY VIRUS
PIVGAETFYV

SEQ ID NO: 7751 - protein, 10 aa, HUMAN IMMUNODEFICIENCY VIRUS
EQLIKKEKVY

SEQ ID NO: 7752 - protein, 11 aa, HUMAN IMMUNODEFICIENCY VIRUS
IIEQLIKKEKV

SEQ ID NO: 7753 - protein, 8 aa, HUMAN IMMUNODEFICIENCY VIRUS
PPVVAKEI

SEQ ID NO: 7754 - protein, 9 aa, HUMAN IMMUNODEFICIENCY VIRUS
IIDIIATDI

SEQ ID NO: 7755 - protein, 10 aa, HUMAN IMMUNODEFICIENCY VIRUS
YVTDRGRQKV

SEQ ID NO: 7756 - protein, 10 aa, HUMAN IMMUNODEFICIENCY VIRUS
QVDKLVSSGI

SEQ ID NO: 7757 - protein, 10 aa, HUMAN IMMUNODEFICIENCY VIRUS
RIIDIIATDI

SEQ ID NO: 7758 - protein, 11 aa, HUMAN IMMUNODEFICIENCY VIRUS
EQVDKLVSSGI

SEQ ID NO: 7759 - protein, 8 aa, HUMAN IMMUNODEFICIENCY VIRUS
TPKFRLPI

SEQ ID NO: 7760 - protein, 8 aa, HUMAN IMMUNODEFICIENCY VIRUS
IILVAVHV

SEQ ID NO: 7761 - protein, 9 aa, HUMAN IMMUNODEFICIENCY VIRUS
KIILVAVHV

SEQ ID NO: 7762 - protein, 10 aa, HUMAN IMMUNODEFICIENCY VIRUS
KLAGRWPVKV

SEQ ID NO: 7763 - protein, 8 aa, HUMAN IMMUNODEFICIENCY VIRUS
GQWTYQIY

SEQ ID NO: 7764 - protein, 8 aa, HUMAN IMMUNODEFICIENCY VIRUS
YQLEKEPI

SEQ ID NO: 7765 - protein, 8 aa, HUMAN IMMUNODEFICIENCY VIRUS
GQETAYFI

SEQ ID NO: 7766 - protein, 9 aa, HUMAN IMMUNODEFICIENCY VIRUS
HLEGKIILV

SEQ ID NO: 7767 - protein, 11 aa, HUMAN IMMUNODEFICIENCY VIRUS
IPSINNETPGI

SEQ ID NO: 7768 - protein, 11 aa, HUMAN IMMUNODEFICIENCY VIRUS
GVYYDPSKDLI

SEQ ID NO: 7769 - protein, 11 aa, HUMAN IMMUNODEFICIENCY VIRUS
KLWYQLEKEPI

SEQ ID NO: 7770 - protein, 11 aa, HUMAN IMMUNODEFICIENCY VIRUS
HLEGKIILVAV

SEQ ID NO: 7771 - protein, 10 aa, HUMAN IMMUNODEFICIENCY VIRUS
KQLTEAVQKI

SEQ ID NO: 7772 - protein, 8 aa, HUMAN IMMUNODEFICIENCY VIRUS
AVKAACWW

SEQ ID NO: 7773 - protein, 9 aa, HUMAN IMMUNODEFICIENCY VIRUS
SINNETPGI

SEQ ID NO: 7774 - protein, 9 aa, HUMAN IMMUNODEFICIENCY VIRUS
FILKLAGRW

SEQ ID NO: 7775 - protein, 11 aa, HUMAN IMMUNODEFICIENCY VIRUS
EMEKEGKISKI

SEQ ID NO: 7776 - protein, 11 aa, HUMAN IMMUNODEFICIENCY VIRUS
SINNETPGIRY

SEQ ID NO: 7777 - protein, 11 aa, HUMAN IMMUNODEFICIENCY VIRUS
FILKLAGRWPV

SEQ ID NO: 7778 - protein, 11 aa, HUMAN IMMUNODEFICIENCY VIRUS
QLDCTHLEGKI

SEQ ID NO: 7779 - protein, 9 aa, HUMAN IMMUNODEFICIENCY VIRUS
DVKQLTEAV

SEQ ID NO: 7780 - protein, 9 aa, HUMAN IMMUNODEFICIENCY VIRUS
ELQKQITKI

SEQ ID NO: 7781 - protein, 9 aa, HUMAN IMMUNODEFICIENCY VIRUS
KQITKIQNF

SEQ ID NO: 7782 - protein, 11 aa, HUMAN IMMUNODEFICIENCY VIRUS
KQITKIQNFRV

SEQ ID NO: 7783 - protein, 8 aa, HUMAN IMMUNODEFICIENCY VIRUS
ILKLAGRW

SEQ ID NO: 7784 - protein, 9 aa, HUMAN IMMUNODEFICIENCY VIRUS
QLTEAVQKI

SEQ ID NO: 7785 - protein, 10 aa, HUMAN IMMUNODEFICIENCY VIRUS
ILKLAGRWPV

SEQ ID NO: 7786 - protein, 11 aa, HUMAN IMMUNODEFICIENCY VIRUS
LQKQITKIQNF

SEQ ID NO: 7787 - protein, 11 aa, HUMAN IMMUNODEFICIENCY VIRUS
RVYYRDSRDPI

SEQ ID NO: 7788 - protein, 8 aa, HUMAN IMMUNODEFICIENCY VIRUS
LIKKEKVY

SEQ ID NO: 7789 - protein, 8 aa, HUMAN IMMUNODEFICIENCY VIRUS
QITKIQNF

SEQ ID NO: 7790 - protein, 10 aa, HUMAN IMMUNODEFICIENCY VIRUS
NLPGKWKPKM

SEQ ID NO: 7791 - protein, 10 aa, HUMAN IMMUNODEFICIENCY VIRUS
QITKIQNFRV

SEQ ID NO: 7792 - protein, 11 aa, HUMAN IMMUNODEFICIENCY VIRUS
NLPGKWKPKMI

SEQ ID NO: 7793 - protein, 11 aa, HUMAN IMMUNODEFICIENCY VIRUS
QITKIQNFRVY

SEQ ID NO: 7794 - protein, 11 aa, HUMAN IMMUNODEFICIENCY VIRUS
PIWKGPAKLLW

SEQ ID NO: 7795 - protein, 8 aa, HUMAN IMMUNODEFICIENCY VIRUS
KLGKAGYV

SEQ ID NO: 7796 - protein, 8 aa, HUMAN IMMUNODEFICIENCY VIRUS
LQKQITKI

SEQ ID NO: 7797 - protein, 10 aa, HUMAN IMMUNODEFICIENCY VIRUS
AIFQSSMTKI

SEQ ID NO: 7798 - protein, 11 aa, HUMAN IMMUNODEFICIENCY VIRUS
AQPDKSESELV

SEQ ID NO: 7799 - protein, 8 aa, HUMAN IMMUNODEFICIENCY VIRUS
VIQDNSDI

SEQ ID NO: 7800 - protein, 9 aa, HUMAN IMMUNODEFICIENCY VIRUS
VVIQDNSDI

SEQ ID NO: 7801 - protein, 10 aa, HUMAN IMMUNODEFICIENCY VIRUS
NPYNTPVFAI

SEQ ID NO: 7802 - protein, 10 aa, HUMAN IMMUNODEFICIENCY VIRUS
QPDKSESELV

SEQ ID NO: 7803 - protein, 10 aa, HUMAN IMMUNODEFICIENCY VIRUS
AVVIQDNSDI

SEQ ID NO: 7804 - protein, 10 aa, HUMAN IMMUNODEFICIENCY VIRUS
VIQDNSDIKV

SEQ ID NO: 7805 - protein, 11 aa, HUMAN IMMUNODEFICIENCY VIRUS
YLSWVPAHKGI

SEQ ID NO: 7806 - protein, 11 aa, HUMAN IMMUNODEFICIENCY VIRUS
VVIQDNSDIKV

SEQ ID NO: 7807 - protein, 11 aa, HUMAN IMMUNODEFICIENCY VIRUS
VIQDNSDIKVV

SEQ ID NO: 7808 - protein, 8 aa, HUMAN IMMUNODEFICIENCY VIRUS
NPYNTPVF

SEQ ID NO: 7809 - protein, 8 aa, HUMAN IMMUNODEFICIENCY VIRUS
FQSSMTKI

SEQ ID NO: 7810 - protein, 9 aa, HUMAN IMMUNODEFICIENCY VIRUS
IQDNSDIKV

SEQ ID NO: 7811 - protein, 10 aa, HUMAN IMMUNODEFICIENCY VIRUS
GPENPYNTPV

SEQ ID NO: 7812 - protein, 10 aa, HUMAN IMMUNODEFICIENCY VIRUS
IQDNSDIKVV

SEQ ID NO: 7813 - protein, 11 aa, HUMAN IMMUNODEFICIENCY VIRUS
GPENPYNTPVF

SEQ ID NO: 7814 - protein, 11 aa, HUMAN IMMUNODEFICIENCY VIRUS
ILKEPVHGVYY

SEQ ID NO: 7815 - protein, 9 aa, HUMAN IMMUNODEFICIENCY VIRUS
LPGKWKPKM

SEQ ID NO: 7816 - protein, 10 aa, HUMAN IMMUNODEFICIENCY VIRUS
LPGKWKPKMI

SEQ ID NO: 7817 - protein, 9 aa, HUMAN IMMUNODEFICIENCY VIRUS
LPEKDSWTV

SEQ ID NO: 7818 - protein, 10 aa, HUMAN IMMUNODEFICIENCY VIRUS
ILKEPVHGVY

SEQ ID NO: 7819 - protein, 11 aa, HUMAN IMMUNODEFICIENCY VIRUS
EILKEPVHGVY

SEQ ID NO: 7820 - protein, 8 aa, HUMAN IMMUNODEFICIENCY VIRUS
KVRQYDQI

SEQ ID NO: 7821 - protein, 8 aa, HUMAN IMMUNODEFICIENCY VIRUS
QIGCTLNF

SEQ ID NO: 7822 - protein, 8 aa, HUMAN IMMUNODEFICIENCY VIRUS
EPVHGVYY

SEQ ID NO: 7823 - protein, 9 aa, HUMAN IMMUNODEFICIENCY VIRUS
TQIGCTLNF

SEQ ID NO: 7824 - protein, 9 aa, HUMAN IMMUNODEFICIENCY VIRUS
ILKEPVHGV

SEQ ID NO: 7825 - protein, 10 aa, HUMAN IMMUNODEFICIENCY VIRUS
FIKVRQYDQI

SEQ ID NO: 7826 - protein, 10 aa, HUMAN IMMUNODEFICIENCY VIRUS
QIGCTLNFPI

SEQ ID NO: 7827 - protein, 10 aa, HUMAN IMMUNODEFICIENCY VIRUS
EILKEPVHGV

SEQ ID NO: 7828 - protein, 11 aa, HUMAN IMMUNODEFICIENCY VIRUS
TQIGCTLNFPI

SEQ ID NO: 7829 - protein, 11 aa, HUMAN IMMUNODEFICIENCY VIRUS
KISKIGPENPY

SEQ ID NO: 7830 - protein, 11 aa, HUMAN IMMUNODEFICIENCY VIRUS
SIVIWGKTPKF

SEQ ID NO: 7831 - protein, 8 aa, HUMAN IMMUNODEFICIENCY VIRUS
EMEKEGKI

SEQ ID NO: 7832 - protein, 9 aa, HUMAN IMMUNODEFICIENCY VIRUS
SPAIFQSSM

SEQ ID NO: 7833 - protein, 9 aa, HUMAN IMMUNODEFICIENCY VIRUS
NQKTELQAI

SEQ ID NO: 7834 - protein, 11 aa, HUMAN IMMUNODEFICIENCY VIRUS
IVIYQYMDDLY

SEQ ID NO: 7835 - protein, 8 aa, HUMAN IMMUNODEFICIENCY VIRUS
YQIYQEPF

SEQ ID NO: 7836 - protein, 9 aa, HUMAN IMMUNODEFICIENCY VIRUS
SMTKILEPF

SEQ ID NO: 7837 - protein, 8 aa, HUMAN IMMUNODEFICIENCY VIRUS
QMAGDDCV

SEQ ID NO: 7838 - protein, 9 aa, HUMAN IMMUNODEFICIENCY VIRUS
KQMAGDDCV

SEQ ID NO: 7839 - protein, 10 aa, HUMAN IMMUNODEFICIENCY VIRUS
IQTKELQKQI

SEQ ID NO: 7840 - protein, 11 aa, HUMAN IMMUNODEFICIENCY VIRUS
DIQTKELQKQI

SEQ ID NO: 7841 - protein, 11 aa, HUMAN IMMUNODEFICIENCY VIRUS
EPFKNLKTGKY

SEQ ID NO: 7842 - protein, 10 aa, HUMAN IMMUNODEFICIENCY VIRUS
DQAEHLKTAV

SEQ ID NO: 7843 - protein, 8 aa, HUMAN IMMUNODEFICIENCY VIRUS
LPIQKETW

SEQ ID NO: 7844 - protein, 9 aa, HUMAN IMMUNODEFICIENCY VIRUS
VIWGKTPKF

SEQ ID NO: 7845 - protein, 10 aa, HUMAN IMMUNODEFICIENCY VIRUS
QITLWQRPLV

SEQ ID NO: 7846 - protein, 10 aa, HUMAN IMMUNODEFICIENCY VIRUS
IVIWGKTPKF

SEQ ID NO: 7847 - protein, 11 aa, HUMAN IMMUNODEFICIENCY VIRUS
PQITLWQRPLV

SEQ ID NO: 7848 - protein, 11 aa, HUMAN IMMUNODEFICIENCY VIRUS
KLKPGMDGPKV

SEQ ID NO: 7849 - protein, 11 aa, HUMAN IMMUNODEFICIENCY VIRUS
LVAVHVASGYI

SEQ ID NO: 7850 - protein, 8 aa, HUMAN IMMUNODEFICIENCY VIRUS
TLWQRPLV

SEQ ID NO: 7851 - protein, 10 aa, HUMAN IMMUNODEFICIENCY VIRUS
GLKKKKSVTV

SEQ ID NO: 7852 - protein, 11 aa, HUMAN IMMUNODEFICIENCY VIRUS
GIRKVLFLDGI

SEQ ID NO: 7853 - protein, 8 aa, HUMAN IMMUNODEFICIENCY VIRUS
KVLFLDGI

SEQ ID NO: 7854 - protein, 9 aa, HUMAN IMMUNODEFICIENCY VIRUS
VPRRKAKII

SEQ ID NO: 7855 - protein, 9 aa, HUMAN IMMUNODEFICIENCY VIRUS
IIRDYGKQM

SEQ ID NO: 7856 - protein, 10 aa, HUMAN IMMUNODEFICIENCY VIRUS
VVPRRKAKII

SEQ ID NO: 7857 - protein, 10 aa, HUMAN IMMUNODEFICIENCY VIRUS
KIIRDYGKQM

SEQ ID NO: 7858 - protein, 11 aa, HUMAN IMMUNODEFICIENCY VIRUS
HPAGLKKKKSV

SEQ ID NO: 7859 - protein, 11 aa, HUMAN IMMUNODEFICIENCY VIRUS
KVVPRRKAKII

SEQ ID NO: 7860 - protein, 8 aa, HUMAN IMMUNODEFICIENCY VIRUS
KIGPENPY

SEQ ID NO: 7861 - protein, 8 aa, HUMAN IMMUNODEFICIENCY VIRUS
VPRRKAKI

SEQ ID NO: 7862 - protein, 9 aa, HUMAN IMMUNODEFICIENCY VIRUS
KPGMDGPKV

SEQ ID NO: 7863 - protein, 9 aa, HUMAN IMMUNODEFICIENCY VIRUS
VVPRRKAKI

SEQ ID NO: 7864 - protein, 10 aa, HUMAN IMMUNODEFICIENCY VIRUS
GMDGPKVKQW

SEQ ID NO: 7865 - protein, 10 aa, HUMAN IMMUNODEFICIENCY VIRUS
TPGIRYQYNV

SEQ ID NO: 7866 - protein, 10 aa, HUMAN IMMUNODEFICIENCY VIRUS
VIYQYMDDLY

SEQ ID NO: 7867 - protein, 10 aa, HUMAN IMMUNODEFICIENCY VIRUS
KVVPRRKAKI

SEQ ID NO: 7868 - protein, 11 aa, HUMAN IMMUNODEFICIENCY VIRUS
VLVGPTPVNII

SEQ ID NO: 7869 - protein, 11 aa, HUMAN IMMUNODEFICIENCY VIRUS
VIYQYMDDLYV

SEQ ID NO: 7870 - protein, 8 aa, HUMAN IMMUNODEFICIENCY VIRUS
WIPEWEFV

SEQ ID NO: 7871 - protein, 8 aa, HUMAN IMMUNODEFICIENCY VIRUS
IQNFRVYY

SEQ ID NO: 7872 - protein, 8 aa, HUMAN IMMUNODEFICIENCY VIRUS
GLKKKKSV

SEQ ID NO: 7873 - protein, 8 aa, HUMAN IMMUNODEFICIENCY VIRUS
TPGIRYQY

SEQ ID NO: 7874 - protein, 8 aa, HUMAN IMMUNODEFICIENCY VIRUS
GIRYQYNV

SEQ ID NO: 7875 - protein, 8 aa, HUMAN IMMUNODEFICIENCY VIRUS
KIQNFRVY

SEQ ID NO: 7876 - protein, 9 aa, HUMAN IMMUNODEFICIENCY VIRUS
KIQNFRVYY

SEQ ID NO: 7877 - protein, 10 aa, HUMAN IMMUNODEFICIENCY VIRUS
LVGPTPVNII

SEQ ID NO: 7878 - protein, 11 aa, HUMAN IMMUNODEFICIENCY VIRUS
WQATWIPEWEF

SEQ ID NO: 7879 - protein, 11 aa, HUMAN IMMUNODEFICIENCY VIRUS
HVASGYIEAEV

SEQ ID NO: 7880 - protein, 8 aa, HUMAN IMMUNODEFICIENCY VIRUS
VLVGPTPV

SEQ ID NO: 7881 - protein, 8 aa, HUMAN IMMUNODEFICIENCY VIRUS
CQLKGEAM

SEQ ID NO: 7882 - protein, 8 aa, HUMAN IMMUNODEFICIENCY VIRUS
SQGVVESM

SEQ ID NO: 7883 - protein, 9 aa, HUMAN IMMUNODEFICIENCY VIRUS
TVLVGPTPV

SEQ ID NO: 7884 - protein, 9 aa, HUMAN IMMUNODEFICIENCY VIRUS
AVHVASGYI

SEQ ID NO: 7885 - protein, 9 aa, HUMAN IMMUNODEFICIENCY VIRUS
SMNKELKKI

SEQ ID NO: 7886 - protein, 10 aa, HUMAN IMMUNODEFICIENCY VIRUS
VLVGPTPVNI

SEQ ID NO: 7887 - protein, 10 aa, HUMAN IMMUNODEFICIENCY VIRUS
HPDKWTVQPI

SEQ ID NO: 7888 - protein, 10 aa, HUMAN IMMUNODEFICIENCY VIRUS
ELELAENREI

SEQ ID NO: 7889 - protein, 10 aa, HUMAN IMMUNODEFICIENCY VIRUS
LVAVHVASGY

SEQ ID NO: 7890 - protein, 10 aa, HUMAN IMMUNODEFICIENCY VIRUS
PQSQGVVESM

SEQ ID NO: 7891 - protein, 10 aa, HUMAN IMMUNODEFICIENCY VIRUS
SMNKELKKII

SEQ ID NO: 7892 - protein, 11 aa, HUMAN IMMUNODEFICIENCY VIRUS
GIGGFIKVRQY

SEQ ID NO: 7893 - protein, 11 aa, HUMAN IMMUNODEFICIENCY VIRUS
TVLVGPTPVNI

SEQ ID NO: 7894 - protein, 11 aa, HUMAN IMMUNODEFICIENCY VIRUS
VLDVGDAYFSV

SEQ ID NO: 7895 - protein, 11 aa, HUMAN IMMUNODEFICIENCY VIRUS
QLKGEAMHGQV

SEQ ID NO: 7896 - protein, 11 aa, HUMAN IMMUNODEFICIENCY VIRUS
ILVAVHVASGY

SEQ ID NO: 7897 - protein, 11 aa, HUMAN IMMUNODEFICIENCY VIRUS
NPQSQGVVESM

SEQ ID NO: 7898 - protein, 8 aa, HUMAN IMMUNODEFICIENCY VIRUS
FVNTPPLV

SEQ ID NO: 7899 - protein, 11 aa, HUMAN IMMUNODEFICIENCY VIRUS
FVNTPPLVKLW

SEQ ID NO: 7900 - protein, 8 aa, HUMAN IMMUNODEFICIENCY VIRUS
GPTPVNII

SEQ ID NO: 7901 - protein, 9 aa, HUMAN IMMUNODEFICIENCY VIRUS
LVGPTPVNI

SEQ ID NO: 7902 - protein, 9 aa, HUMAN IMMUNODEFICIENCY VIRUS
DVGDAYFSV

SEQ ID NO: 7903 - protein, 9 aa, HUMAN IMMUNODEFICIENCY VIRUS
WQATWIPEW

SEQ ID NO: 7904 - protein, 10 aa, HUMAN IMMUNODEFICIENCY VIRUS
TVPVKLKPGM

SEQ ID NO: 7905 - protein, 11 aa, HUMAN IMMUNODEFICIENCY VIRUS
FPISPIETVPV

SEQ ID NO: 7906 - protein, 11 aa, HUMAN IMMUNODEFICIENCY VIRUS
TQDFWEVQLGI

SEQ ID NO: 7907 - protein, 8 aa, HUMAN IMMUNODEFICIENCY VIRUS
SPIETVPV

SEQ ID NO: 7908 - protein, 8 aa, HUMAN IMMUNODEFICIENCY VIRUS
PVKLKPGM

SEQ ID NO: 7909 - protein, 8 aa, HUMAN IMMUNODEFICIENCY VIRUS
WPLTEEKI

SEQ ID NO: 7910 - protein, 9 aa, HUMAN IMMUNODEFICIENCY VIRUS
FPISPIETV

SEQ ID NO: 7911 - protein, 9 aa, HUMAN IMMUNODEFICIENCY VIRUS
VPVKLKPGM

SEQ ID NO: 7912 - protein, 10 aa, HUMAN IMMUNODEFICIENCY VIRUS
PISPIETVPV

SEQ ID NO: 7913 - protein, 10 aa, HUMAN IMMUNODEFICIENCY VIRUS
KQWPLTEEKI

SEQ ID NO: 7914 - protein, 11 aa, HUMAN IMMUNODEFICIENCY VIRUS
SVTVLDVGDAY

SEQ ID NO: 7915 - protein, 8 aa, HUMAN IMMUNODEFICIENCY VIRUS
PISPIETV

SEQ ID NO: 7916 - protein, 8 aa, HUMAN IMMUNODEFICIENCY VIRUS
ELAENREI

SEQ ID NO: 7917 - protein, 8 aa, HUMAN IMMUNODEFICIENCY VIRUS
TPPLVKLW

SEQ ID NO: 7918 - protein, 8 aa, HUMAN IMMUNODEFICIENCY VIRUS
PPLVKLWY

SEQ ID NO: 7919 - protein, 8 aa, HUMAN IMMUNODEFICIENCY VIRUS
QVDCSPGI

SEQ ID NO: 7920 - protein, 8 aa, HUMAN IMMUNODEFICIENCY VIRUS
HLKTAVQM

SEQ ID NO: 7921 - protein, 9 aa, HUMAN IMMUNODEFICIENCY VIRUS
ELNKRTQDF

SEQ ID NO: 7922 - protein, 9 aa, HUMAN IMMUNODEFICIENCY VIRUS
TVLDVGDAY

SEQ ID NO: 7923 - protein, 9 aa, HUMAN IMMUNODEFICIENCY VIRUS
TPPLVKLWY

SEQ ID NO: 7924 - protein, 9 aa, HUMAN IMMUNODEFICIENCY VIRUS
GQVDCSPGI

SEQ ID NO: 7925 - protein, 9 aa, HUMAN IMMUNODEFICIENCY VIRUS
QVDCSPGIW

SEQ ID NO: 7926 - protein, 9 aa, HUMAN IMMUNODEFICIENCY VIRUS
ELKKIIGQV

SEQ ID NO: 7927 - protein, 10 aa, HUMAN IMMUNODEFICIENCY VIRUS
AIKKKDSTKW

SEQ ID NO: 7928 - protein, 10 aa, HUMAN IMMUNODEFICIENCY VIRUS
ELNKRTQDFW

SEQ ID NO: 7929 - protein, 10 aa, HUMAN IMMUNODEFICIENCY VIRUS
TVLDVGDAYF

SEQ ID NO: 7930 - protein, 10 aa, HUMAN IMMUNODEFICIENCY VIRUS
GQVDCSPGIW

SEQ ID NO: 7931 - protein, 10 aa, HUMAN IMMUNODEFICIENCY VIRUS
HLKTAVQMAV

SEQ ID NO: 7932 - protein, 11 aa, HUMAN IMMUNODEFICIENCY VIRUS
HLKTAVQMAVF

SEQ ID NO: 7933 - protein, 11 aa, HUMAN IMMUNODEFICIENCY VIRUS
GIGGYSAGERI

SEQ ID NO: 7934 - protein, 11 aa, HUMAN IMMUNODEFICIENCY VIRUS
LPQGWKGSPAI

SEQ ID NO: 7935 - protein, 8 aa, HUMAN IMMUNODEFICIENCY VIRUS
YVGSDLEI

SEQ ID NO: 7936 - protein, 10 aa, HUMAN IMMUNODEFICIENCY VIRUS
DLYVGSDLEI

SEQ ID NO: 7937 - protein, 11 aa, HUMAN IMMUNODEFICIENCY VIRUS
IVTDSQYALGI

SEQ ID NO: 7938 - protein, 11 aa, HUMAN IMMUNODEFICIENCY VIRUS
IPAETGQETAY

SEQ ID NO: 7939 - protein, 11 aa, HUMAN IMMUNODEFICIENCY VIRUS
FIHNFKRKGGI

SEQ ID NO: 7940 - protein, 8 aa, HUMAN IMMUNODEFICIENCY VIRUS
SQYALGII

SEQ ID NO: 7941 - protein, 8 aa, HUMAN IMMUNODEFICIENCY VIRUS
GIGGNEQV

SEQ ID NO: 7942 - protein, 8 aa, HUMAN IMMUNODEFICIENCY VIRUS
AVHVASGY

SEQ ID NO: 7943 - protein, 8 aa, HUMAN IMMUNODEFICIENCY VIRUS
KLAGRWPV

SEQ ID NO: 7944 - protein, 8 aa, HUMAN IMMUNODEFICIENCY VIRUS
NPQSQGVV

SEQ ID NO: 7945 - protein, 10 aa, HUMAN IMMUNODEFICIENCY VIRUS
PQGWKGSPAI

SEQ ID NO: 7946 - protein, 10 aa, HUMAN IMMUNODEFICIENCY VIRUS
EVNIVTDSQY

SEQ ID NO: 7947 - protein, 11 aa, HUMAN IMMUNODEFICIENCY VIRUS
PQGWKGSPAIF

SEQ ID NO: 7948 - protein, 11 aa, HUMAN IMMUNODEFICIENCY VIRUS
IPYNPQSQGVV

SEQ ID NO: 7949 - protein, 11 aa, HUMAN IMMUNODEFICIENCY VIRUS
KLLWKGEGAVV

SEQ ID NO: 7950 - protein, 11 aa, HUMAN IMMUNODEFICIENCY VIRUS
LLWKGEGAVVI

SEQ ID NO: 7951 - protein, 8 aa, HUMAN IMMUNODEFICIENCY VIRUS
KPKMIGGI

SEQ ID NO: 7952 - protein, 8 aa, HUMAN IMMUNODEFICIENCY VIRUS
VLDVGDAY

SEQ ID NO: 7953 - protein, 8 aa, HUMAN IMMUNODEFICIENCY VIRUS
AVQMAVFI

SEQ ID NO: 7954 - protein, 9 aa, HUMAN IMMUNODEFICIENCY VIRUS
VLDVGDAYF

SEQ ID NO: 7955 - protein, 9 aa, HUMAN IMMUNODEFICIENCY VIRUS
ELHPDKWTV

SEQ ID NO: 7956 - protein, 9 aa, HUMAN IMMUNODEFICIENCY VIRUS
KLNWASQIY

SEQ ID NO: 7957 - protein, 9 aa, HUMAN IMMUNODEFICIENCY VIRUS
QMAVFIHNF

SEQ ID NO: 7958 - protein, 10 aa, HUMAN IMMUNODEFICIENCY VIRUS
VQMAVFIHNF

SEQ ID NO: 7959 - protein, 10 aa, HUMAN IMMUNODEFICIENCY VIRUS
KLLWKGEGAV

SEQ ID NO: 7960 - protein, 11 aa, HUMAN IMMUNODEFICIENCY VIRUS
KPKMIGGIGGF

SEQ ID NO: 7961 - protein, 11 aa, HUMAN IMMUNODEFICIENCY VIRUS
WMGYELHPDKW

SEQ ID NO: 7962 - protein, 11 aa, HUMAN IMMUNODEFICIENCY VIRUS
LVGKLNWASQI

SEQ ID NO: 7963 - protein, 11 aa, HUMAN IMMUNODEFICIENCY VIRUS
AVQMAVFIHNF

SEQ ID NO: 7964 - protein, 9 aa, HUMAN IMMUNODEFICIENCY VIRUS
TLNFPISPI

SEQ ID NO: 7965 - protein, 8 aa, HUMAN IMMUNODEFICIENCY VIRUS
YQYMDDLY

SEQ ID NO: 7966 - protein, 8 aa, HUMAN IMMUNODEFICIENCY VIRUS
KLNWASQI

SEQ ID NO: 7967 - protein, 9 aa, HUMAN IMMUNODEFICIENCY VIRUS
YQYMDDLYV

SEQ ID NO: 7968 - protein, 9 aa, HUMAN IMMUNODEFICIENCY VIRUS
TVNDIQKLV

SEQ ID NO: 7969 - protein, 10 aa, HUMAN IMMUNODEFICIENCY VIRUS
LLWKGEGAVV

SEQ ID NO: 7970 - protein, 11 aa, HUMAN IMMUNODEFICIENCY VIRUS
ALLDTGADDTV

SEQ ID NO: 7971 - protein, 8 aa, HUMAN IMMUNODEFICIENCY VIRUS
MIGGIGGF

SEQ ID NO: 7972 - protein, 8 aa, HUMAN IMMUNODEFICIENCY VIRUS
KLVGKLNW

SEQ ID NO: 7973 - protein, 8 aa, HUMAN IMMUNODEFICIENCY VIRUS
NIVTDSQY

SEQ ID NO: 7974 - protein, 9 aa, HUMAN IMMUNODEFICIENCY VIRUS
KMIGGIGGF

SEQ ID NO: 7975 - protein, 9 aa, HUMAN IMMUNODEFICIENCY VIRUS
MIGGIGGFI

SEQ ID NO: 7976 - protein, 9 aa, HUMAN IMMUNODEFICIENCY VIRUS
HQKEPPFLW

SEQ ID NO: 7977 - protein, 9 aa, HUMAN IMMUNODEFICIENCY VIRUS
LLWKGEGAV

SEQ ID NO: 7978 - protein, 10 aa, HUMAN IMMUNODEFICIENCY VIRUS
KMIGGIGGFI

SEQ ID NO: 7979 - protein, 10 aa, HUMAN IMMUNODEFICIENCY VIRUS
HQKEPPFLWM

SEQ ID NO: 7980 - protein, 10 aa, HUMAN IMMUNODEFICIENCY VIRUS
IQKLVGKLNW

SEQ ID NO: 7981 - protein, 11 aa, HUMAN IMMUNODEFICIENCY VIRUS
MIGGIGGFIKV

SEQ ID NO: 7982 - protein, 11 aa, HUMAN IMMUNODEFICIENCY VIRUS
DIQKLVGKLNW

SEQ ID NO: 7983 - protein, 8 aa, HUMAN IMMUNODEFICIENCY VIRUS
WVPAHKGI

SEQ ID NO: 7984 - protein, 9 aa, HUMAN IMMUNODEFICIENCY VIRUS
EPPFLWMGY

SEQ ID NO: 7985 - protein, 10 aa, HUMAN IMMUNODEFICIENCY VIRUS
LLDTGADDTV

SEQ ID NO: 7986 - protein, 10 aa, HUMAN IMMUNODEFICIENCY VIRUS
YQYNVLPQGW

SEQ ID NO: 7987 - protein, 10 aa, HUMAN IMMUNODEFICIENCY VIRUS
IPYNPQSQGV

SEQ ID NO: 7988 - protein, 11 aa, HUMAN IMMUNODEFICIENCY VIRUS
GIPYNPQSQGV

SEQ ID NO: 7989 - protein, 8 aa, HUMAN IMMUNODEFICIENCY VIRUS
GIGGFIKV

SEQ ID NO: 7990 - protein, 8 aa, HUMAN IMMUNODEFICIENCY VIRUS
PPFLWMGY

SEQ ID NO: 7991 - protein, 8 aa, HUMAN IMMUNODEFICIENCY VIRUS
PQGTETGV

SEQ ID NO: 7992 - protein, 8 aa, HUMAN IMMUNODEFICIENCY VIRUS
SQGTETGV

SEQ ID NO: 7993 - protein, 9 aa, HUMAN IMMUNODEFICIENCY VIRUS
QPQGTETGV

SEQ ID NO: 7994 - protein, 9 aa, HUMAN IMMUNODEFICIENCY VIRUS
CLGRPAEPV

SEQ ID NO: 7995 - protein, 9 aa, HUMAN IMMUNODEFICIENCY VIRUS
TQGVGSPQI

SEQ ID NO: 7996 - protein, 8 aa, HUMAN IMMUNODEFICIENCY VIRUS
LLKTVRLI

SEQ ID NO: 7997 - protein, 8 aa, HUMAN IMMUNODEFICIENCY VIRUS
RQRQIHSI

SEQ ID NO: 7998 - protein, 8 aa, HUMAN IMMUNODEFICIENCY VIRUS
VPLQLPPI

SEQ ID NO: 7999 - protein, 9 aa, HUMAN IMMUNODEFICIENCY VIRUS
PVPLQLPPI

SEQ ID NO: 8000 - protein, 10 aa, HUMAN IMMUNODEFICIENCY VIRUS
EPVPLQLPPI

SEQ ID NO: 8001 - protein, 9 aa, HUMAN IMMUNODEFICIENCY VIRUS
AVRIIKILY

SEQ ID NO: 8002 - protein, 11 aa, HUMAN IMMUNODEFICIENCY VIRUS
RQARKNRRRRW

SEQ ID NO: 8003 - protein, 11 aa, HUMAN IMMUNODEFICIENCY VIRUS
IIKILYQSNPY

SEQ ID NO: 8004 - protein, 9 aa, HUMAN IMMUNODEFICIENCY VIRUS
KILYQSNPY

SEQ ID NO: 8005 - protein, 8 aa, HUMAN IMMUNODEFICIENCY VIRUS
ILYQSNPY

SEQ ID NO: 8006 - protein, 11 aa, HUMAN IMMUNODEFICIENCY VIRUS
RQARRNRRRRW

SEQ ID NO: 8007 - protein, 9 aa, HUMAN IMMUNODEFICIENCY VIRUS
GPKESKKKV

SEQ ID NO: 8008 - protein, 10 aa, HUMAN IMMUNODEFICIENCY VIRUS
EPVDPRLEPW

SEQ ID NO: 8009 - protein, 8 aa, HUMAN IMMUNODEFICIENCY VIRUS
FLNKGLGI

SEQ ID NO: 8010 - protein, 9 aa, HUMAN IMMUNODEFICIENCY VIRUS
PVDPRLEPW

SEQ ID NO: 8011 - protein, 10 aa, HUMAN IMMUNODEFICIENCY VIRUS
EPVDPNLEPW

SEQ ID NO: 8012 - protein, 10 aa, HUMAN IMMUNODEFICIENCY VIRUS
FLNKGLGISY

SEQ ID NO: 8013 - protein, 9 aa, HUMAN IMMUNODEFICIENCY VIRUS
PVDPNLEPW

SEQ ID NO: 8014 - protein, 8 aa, HUMAN IMMUNODEFICIENCY VIRUS
ALIKPKKI

SEQ ID NO: 8015 - protein, 9 aa, HUMAN IMMUNODEFICIENCY VIRUS
PLGEARLVI

SEQ ID NO: 8016 - protein, 10 aa, HUMAN IMMUNODEFICIENCY VIRUS
QVDRMRINTW

SEQ ID NO: 8017 - protein, 10 aa, HUMAN IMMUNODEFICIENCY VIRUS
HIPLGDARLV

SEQ ID NO: 8018 - protein, 10 aa, HUMAN IMMUNODEFICIENCY VIRUS
IPLGEARLVI

SEQ ID NO: 8019 - protein, 11 aa, HUMAN IMMUNODEFICIENCY VIRUS
WQVDRMRINTW

SEQ ID NO: 8020 - protein, 11 aa, HUMAN IMMUNODEFICIENCY VIRUS
HIPLGEARLVI

SEQ ID NO: 8021 - protein, 11 aa, HUMAN IMMUNODEFICIENCY VIRUS
GVSIEWRLRRY

SEQ ID NO: 8022 - protein, 11 aa, HUMAN IMMUNODEFICIENCY VIRUS
QIDPDLADQLI

SEQ ID NO: 8023 - protein, 8 aa, HUMAN IMMUNODEFICIENCY VIRUS
PLGDARLV

SEQ ID NO: 8024 - protein, 9 aa, HUMAN IMMUNODEFICIENCY VIRUS
IPLGDARLV

SEQ ID NO: 8025 - protein, 9 aa, HUMAN IMMUNODEFICIENCY VIRUS
SIEWRLRRY

SEQ ID NO: 8026 - protein, 11 aa, HUMAN IMMUNODEFICIENCY VIRUS
GLADQLIHMHY

SEQ ID NO: 8027 - protein, 8 aa, HUMAN IMMUNODEFICIENCY VIRUS
RLVITTYW

SEQ ID NO: 8028 - protein, 8 aa, HUMAN IMMUNODEFICIENCY VIRUS
LQTGERDW

SEQ ID NO: 8029 - protein, 9 aa, HUMAN IMMUNODEFICIENCY VIRUS
KIRTWNSLV

SEQ ID NO: 8030 - protein, 9 aa, HUMAN IMMUNODEFICIENCY VIRUS
GLQTGERDW

SEQ ID NO: 8031 - protein, 10 aa, HUMAN IMMUNODEFICIENCY VIRUS
IVWQVDRMKI

SEQ ID NO: 8032 - protein, 10 aa, HUMAN IMMUNODEFICIENCY VIRUS
QVDRMKIRTW

SEQ ID NO: 8033 - protein, 11 aa, HUMAN IMMUNODEFICIENCY VIRUS
WQVDRMKIRTW

SEQ ID NO: 8034 - protein, 11 aa, HUMAN IMMUNODEFICIENCY VIRUS
RMKIRTWNSLV

SEQ ID NO: 8035 - protein, 8 aa, HUMAN IMMUNODEFICIENCY VIRUS
WQVDRMKI

SEQ ID NO: 8036 - protein, 8 aa, HUMAN IMMUNODEFICIENCY VIRUS
HPKISSEV

SEQ ID NO: 8037 - protein, 8 aa, HUMAN IMMUNODEFICIENCY VIRUS
HPRISSEV

SEQ ID NO: 8038 - protein, 8 aa, HUMAN IMMUNODEFICIENCY VIRUS
DQLIHMHY

SEQ ID NO: 8039 - protein, 9 aa, HUMAN IMMUNODEFICIENCY VIRUS
DQLIHMHYF

SEQ ID NO: 8040 - protein, 10 aa, HUMAN IMMUNODEFICIENCY VIRUS
HPKISSEVHI

SEQ ID NO: 8041 - protein, 10 aa, HUMAN IMMUNODEFICIENCY VIRUS
HPRISSEVHI

SEQ ID NO: 8042 - protein, 10 aa, HUMAN IMMUNODEFICIENCY VIRUS
SVKKLTEDRW

SEQ ID NO: 8043 - protein, 11 aa, HUMAN IMMUNODEFICIENCY VIRUS
QLIHLYYFDCF

SEQ ID NO: 8044 - protein, 8 aa, HUMAN IMMUNODEFICIENCY VIRUS
DQLIHLYY

SEQ ID NO: 8045 - protein, 8 aa, HUMAN IMMUNODEFICIENCY VIRUS
QLIHLYYF

SEQ ID NO: 8046 - protein, 8 aa, HUMAN IMMUNODEFICIENCY VIRUS
QLIHMHYF

SEQ ID NO: 8047 - protein, 8 aa, HUMAN IMMUNODEFICIENCY VIRUS
IVSPRCEY

SEQ ID NO: 8048 - protein, 9 aa, HUMAN IMMUNODEFICIENCY VIRUS
DQLIHLYYF

SEQ ID NO: 8049 - protein, 11 aa, HUMAN IMMUNODEFICIENCY VIRUS
QVDPGLADQLI

SEQ ID NO: 8050 - protein, 11 aa, HUMAN IMMUNODEFICIENCY VIRUS
QLIHMHYFDCF

SEQ ID NO: 8051 - protein, 8 aa, HUMAN IMMUNODEFICIENCY VIRUS
KISSEVHI

SEQ ID NO: 8052 - protein, 8 aa, HUMAN IMMUNODEFICIENCY VIRUS
RISSEVHI

SEQ ID NO: 8053 - protein, 8 aa, HUMAN IMMUNODEFICIENCY VIRUS
HMHYFDCF

SEQ ID NO: 8054 - protein, 9 aa, HUMAN IMMUNODEFICIENCY VIRUS
RIRTWKSLV

SEQ ID NO: 8055 - protein, 9 aa, HUMAN IMMUNODEFICIENCY VIRUS
RIRTWNSLV

SEQ ID NO: 8056 - protein, 9 aa, HUMAN IMMUNODEFICIENCY VIRUS
GLADQLIHM

SEQ ID NO: 8057 - protein, 10 aa, HUMAN IMMUNODEFICIENCY VIRUS
LIHMHYFDCF

SEQ ID NO: 8058 - protein, 11 aa, HUMAN IMMUNODEFICIENCY VIRUS
RMRIRTWKSLV

SEQ ID NO: 8059 - protein, 11 aa, HUMAN IMMUNODEFICIENCY VIRUS
RMRIRTWNSLV

SEQ ID NO: 8060 - protein, 8 aa, HUMAN IMMUNODEFICIENCY VIRUS
HLYYFDCF

SEQ ID NO: 8061 - protein, 10 aa, HUMAN IMMUNODEFICIENCY VIRUS
LIHLYYFDCF

SEQ ID NO: 8062 - protein, 8 aa, HUMAN IMMUNODEFICIENCY VIRUS
LVKHHMYI

SEQ ID NO: 8063 - protein, 8 aa, HUMAN IMMUNODEFICIENCY VIRUS
HPKVSSEV

SEQ ID NO: 8064 - protein, 8 aa, HUMAN IMMUNODEFICIENCY VIRUS
PLGEARLV

SEQ ID NO: 8065 - protein, 9 aa, HUMAN IMMUNODEFICIENCY VIRUS
SLVKHHMYI

SEQ ID NO: 8066 - protein, 9 aa, HUMAN IMMUNODEFICIENCY VIRUS
IPLGEARLV

SEQ ID NO: 8067 - protein, 9 aa, HUMAN IMMUNODEFICIENCY VIRUS
DPDLADQLI

SEQ ID NO: 8068 - protein, 9 aa, HUMAN IMMUNODEFICIENCY VIRUS
DPGLADQLI

SEQ ID NO: 8069 - protein, 9 aa, HUMAN IMMUNODEFICIENCY VIRUS
KIKPPLPSV

SEQ ID NO: 8070 - protein, 10 aa, HUMAN IMMUNODEFICIENCY VIRUS
HPKVSSEVHI

SEQ ID NO: 8071 - protein, 10 aa, HUMAN IMMUNODEFICIENCY VIRUS
HIPLGEARLV

SEQ ID NO: 8072 - protein, 8 aa, HUMAN IMMUNODEFICIENCY VIRUS
KVSSEVHI

SEQ ID NO: 8073 - protein, 8 aa, HUMAN IMMUNODEFICIENCY VIRUS
LVKHHMYV

SEQ ID NO: 8074 - protein, 9 aa, HUMAN IMMUNODEFICIENCY VIRUS
SLVKHHMYV

SEQ ID NO: 8075 - protein, 9 aa, HUMAN IMMUNODEFICIENCY VIRUS
GLHTGERDW

SEQ ID NO: 8076 - protein, 8 aa, HUMAN IMMUNODEFICIENCY VIRUS
HLGHGVSI

SEQ ID NO: 8077 - protein, 10 aa, HUMAN IMMUNODEFICIENCY VIRUS
HLGHGVSIEW

SEQ ID NO: 8078 - protein, 8 aa, HUMAN IMMUNODEFICIENCY VIRUS
HLGQGVSI

SEQ ID NO: 8079 - protein, 8 aa, HUMAN IMMUNODEFICIENCY VIRUS
GQGVSIEW

SEQ ID NO: 8080 - protein, 10 aa, HUMAN IMMUNODEFICIENCY VIRUS
HLGQGVSIEW

SEQ ID NO: 8081 - protein, 11 aa, HUMAN IMMUNODEFICIENCY VIRUS
SLQYLALTALI

SEQ ID NO: 8082 - protein, 8 aa, HUMAN IMMUNODEFICIENCY VIRUS
YLALTALI

SEQ ID NO: 8083 - protein, 10 aa, HUMAN IMMUNODEFICIENCY VIRUS
LQYLALTALI

SEQ ID NO: 8084 - protein, 10 aa, HUMAN IMMUNODEFICIENCY VIRUS
QVDRMRIRTW

SEQ ID NO: 8085 - protein, 11 aa, HUMAN IMMUNODEFICIENCY VIRUS
WQVDRMRIRTW

SEQ ID NO: 8086 - protein, 8 aa, HUMAN IMMUNODEFICIENCY VIRUS
YQAGHNKV

SEQ ID NO: 8087 - protein, 8 aa, HUMAN IMMUNODEFICIENCY VIRUS
QVMIVWQV

SEQ ID NO: 8088 - protein, 9 aa, HUMAN IMMUNODEFICIENCY VIRUS
WQVMIVWQV

SEQ ID NO: 8089 - protein, 11 aa, HUMAN IMMUNODEFICIENCY VIRUS
QVMIVWQVDRM

SEQ ID NO: 8090 - protein, 11 aa, HUMAN IMMUNODEFICIENCY VIRUS
MIVWQVDRMRI

SEQ ID NO: 8091 - protein, 8 aa, HUMAN IMMUNODEFICIENCY VIRUS
SLVKHHMY

SEQ ID NO: 8092 - protein, 10 aa, HUMAN IMMUNODEFICIENCY VIRUS
VMIVWQVDRM

SEQ ID NO: 8093 - protein, 9 aa, HUMAN IMMUNODEFICIENCY VIRUS
MIVWQVDRM

SEQ ID NO: 8094 - protein, 10 aa, HUMAN IMMUNODEFICIENCY VIRUS
IVWQVDRMRI

SEQ ID NO: 8095 - protein, 8 aa, HUMAN IMMUNODEFICIENCY VIRUS
WQVDRMRI

SEQ ID NO: 8096 - protein, 8 aa, HUMAN IMMUNODEFICIENCY VIRUS
IVWQVDRM

SEQ ID NO: 8097 - protein, 10 aa, HUMAN IMMUNODEFICIENCY VIRUS
RPWLHGLGQY

SEQ ID NO: 8098 - protein, 8 aa, HUMAN IMMUNODEFICIENCY VIRUS
QQLLFVHF

SEQ ID NO: 8099 - protein, 9 aa, HUMAN IMMUNODEFICIENCY VIRUS
LQQLLFVHF

SEQ ID NO: 8100 - protein, 9 aa, HUMAN IMMUNODEFICIENCY VIRUS
QLLFVHFRI

SEQ ID NO: 8101 - protein, 10 aa, HUMAN IMMUNODEFICIENCY VIRUS
QQLLFVHFRI

SEQ ID NO: 8102 - protein, 11 aa, HUMAN IMMUNODEFICIENCY VIRUS
LQQLLFVHFRI

SEQ ID NO: 8103 - protein, 8 aa, HUMAN IMMUNODEFICIENCY VIRUS
KQEAVRHF

SEQ ID NO: 8104 - protein, 8 aa, HUMAN IMMUNODEFICIENCY VIRUS
WLHGLGQY

SEQ ID NO: 8105 - protein, 11 aa, HUMAN IMMUNODEFICIENCY VIRUS
RIGCRHSRIGI

SEQ ID NO: 8106 - protein, 11 aa, HUMAN IMMUNODEFICIENCY VIRUS
RPWLHGLGQHI

SEQ ID NO: 8107 - protein, 8 aa, HUMAN IMMUNODEFICIENCY VIRUS
LLFVHFRI

SEQ ID NO: 8108 - protein, 9 aa, HUMAN IMMUNODEFICIENCY VIRUS
RIGCRHSRI

SEQ ID NO: 8109 - protein, 8 aa, HUMAN IMMUNODEFICIENCY VIRUS
GQHIYNTY

SEQ ID NO: 8110 - protein, 8 aa, HUMAN IMMUNODEFICIENCY VIRUS
AVRHFPRI

SEQ ID NO: 8111 - protein, 8 aa, HUMAN IMMUNODEFICIENCY VIRUS
GQYIYETY

SEQ ID NO: 8112 - protein, 9 aa, HUMAN IMMUNODEFICIENCY VIRUS
AVRHFPRIW

SEQ ID NO: 8113 - protein, 10 aa, HUMAN IMMUNODEFICIENCY VIRUS
HIYNTYGDTW

SEQ ID NO: 8114 - protein, 10 aa, HUMAN IMMUNODEFICIENCY VIRUS
YIYETYGDTW

SEQ ID NO: 8115 - protein, 10 aa, HUMAN IMMUNODEFICIENCY VIRUS
ELKSEAVRHF

SEQ ID NO: 8116 - protein, 9 aa, HUMAN IMMUNODEFICIENCY VIRUS
CQHSRIGII

SEQ ID NO: 8117 - protein, 10 aa, HUMAN IMMUNODEFICIENCY VIRUS
LLEELKSEAV

SEQ ID NO: 8118 - protein, 11 aa, HUMAN IMMUNODEFICIENCY VIRUS
ELLEELKNEAV

SEQ ID NO: 8119 - protein, 11 aa, HUMAN IMMUNODEFICIENCY VIRUS
ELLEELKSEAV

SEQ ID NO: 8120 - protein, 8 aa, HUMAN IMMUNODEFICIENCY VIRUS
GQHIYETY

SEQ ID NO: 8121 - protein, 10 aa, HUMAN IMMUNODEFICIENCY VIRUS
LLEELKNEAV

SEQ ID NO: 8122 - protein, 10 aa, HUMAN IMMUNODEFICIENCY VIRUS
ELKNEAVRHF

SEQ ID NO: 8123 - protein, 10 aa, HUMAN IMMUNODEFICIENCY VIRUS
HIYETYGDTW

SEQ ID NO: 8124 - protein, 9 aa, HUMAN IMMUNODEFICIENCY VIRUS
WLHGLGQHI

SEQ ID NO: 8125 - protein, 10 aa, HUMAN IMMUNODEFICIENCY VIRUS
WLHGLGQHIY

SEQ ID NO: 8126 - protein, 11 aa, HUMAN IMMUNODEFICIENCY VIRUS
IIRILQQLLFI

SEQ ID NO: 8127 - protein, 8 aa, HUMAN IMMUNODEFICIENCY VIRUS
GVEAIIRI

SEQ ID NO: 8128 - protein, 9 aa, HUMAN IMMUNODEFICIENCY VIRUS
AVRHFPRPW

SEQ ID NO: 8129 - protein, 11 aa, HUMAN IMMUNODEFICIENCY VIRUS
RILQQLLFIHF

SEQ ID NO: 8130 - protein, 10 aa, HUMAN IMMUNODEFICIENCY VIRUS
ILQQLLFIHF

SEQ ID NO: 8131 - protein, 9 aa, HUMAN IMMUNODEFICIENCY VIRUS
RILQQLLFI

SEQ ID NO: 8132 - protein, 8 aa, HUMAN IMMUNODEFICIENCY VIRUS
ILQQLLFI

SEQ ID NO: 8133 - protein, 9 aa, HUMAN IMMUNODEFICIENCY VIRUS
PQREPYNEW

SEQ ID NO: 8134 - protein, 10 aa, HUMAN IMMUNODEFICIENCY VIRUS
GPQREPYNEW

SEQ ID NO: 8135 - protein, 11 aa, HUMAN IMMUNODEFICIENCY VIRUS
AIIRILQQLLF

SEQ ID NO: 8136 - protein, 9 aa, HUMAN IMMUNODEFICIENCY VIRUS
DQGPQREPY

SEQ ID NO: 8137 - protein, 10 aa, HUMAN IMMUNODEFICIENCY VIRUS
IIRILQQLLF

SEQ ID NO: 8138 - protein, 8 aa, HUMAN IMMUNODEFICIENCY VIRUS
QQLLFIHF

SEQ ID NO: 8139 - protein, 8 aa, HUMAN IMMUNODEFICIENCY VIRUS
LLFIHFRI

SEQ ID NO: 8140 - protein, 9 aa, HUMAN IMMUNODEFICIENCY VIRUS
LQQLLFIHF

SEQ ID NO: 8141 - protein, 9 aa, HUMAN IMMUNODEFICIENCY VIRUS
QLLFIHFRI

SEQ ID NO: 8142 - protein, 10 aa, HUMAN IMMUNODEFICIENCY VIRUS
QQLLFIHFRI

SEQ ID NO: 8143 - protein, 11 aa, HUMAN IMMUNODEFICIENCY VIRUS
LQQLLFIHFRI

SEQ ID NO: 8144 - protein, 8 aa, HUMAN IMMUNODEFICIENCY VIRUS
RILQQLLF

SEQ ID NO: 8145 - protein, 8 aa, HUMAN IMMUNODEFICIENCY VIRUS
CQHSRIGI

SEQ ID NO: 8146 - protein, 11 aa, HUMAN IMMUNODEFICIENCY VIRUS
RIGCQHSRIGI

SEQ ID NO: 8147 - protein, 9 aa, HUMAN IMMUNODEFICIENCY VIRUS
RIGCQHSRI

SEQ ID NO: 8148 - protein, 8 aa, HUMAN IMMUNODEFICIENCY VIRUS
KVDYRIVI

SEQ ID NO: 8149 - protein, 8 aa, HUMAN IMMUNODEFICIENCY VIRUS
KVDYRLGV

SEQ ID NO: 8150 - protein, 8 aa, HUMAN IMMUNODEFICIENCY VIRUS
RIDYRLGV

SEQ ID NO: 8151 - protein, 9 aa, HUMAN IMMUNODEFICIENCY VIRUS
KVDYRIVIV

SEQ ID NO: 8152 - protein, 11 aa, HUMAN IMMUNODEFICIENCY VIRUS
KVDYRIVIVAF

SEQ ID NO: 8153 - protein, 10 aa, HUMAN IMMUNODEFICIENCY VIRUS
GVEMGHHAPW

SEQ ID NO: 8154 - protein, 11 aa, HUMAN IMMUNODEFICIENCY VIRUS
RIKEIRDDSDY

SEQ ID NO: 8155 - protein, 11 aa, HUMAN IMMUNODEFICIENCY VIRUS
RIREIRDDSDY

SEQ ID NO: 8156 - protein, 8 aa, HUMAN IMMUNODEFICIENCY VIRUS
LIIAIVVW

SEQ ID NO: 8157 - protein, 9 aa, HUMAN IMMUNODEFICIENCY VIRUS
DQEELSALV

SEQ ID NO: 8158 - protein, 9 aa, HUMAN IMMUNODEFICIENCY VIRUS
ILAIVALVV

SEQ ID NO: 8159 - protein, 8 aa, HUMAN IMMUNODEFICIENCY VIRUS
EMGHHAPW

SEQ ID NO: 8160 - protein, 8 aa, HUMAN IMMUNODEFICIENCY VIRUS
ILAIVALV

SEQ ID NO: 8161 - protein, 9 aa, HUMAN IMMUNODEFICIENCY VIRUS
IVFIEYRKI

SEQ ID NO: 8162 - protein, 10 aa, HUMAN IMMUNODEFICIENCY VIRUS
VVWTIVFIEY

SEQ ID NO: 8163 - protein, 11 aa, HUMAN IMMUNODEFICIENCY VIRUS
IVVWTIVFIEY

SEQ ID NO: 8164 - protein, 11 aa, HUMAN IMMUNODEFICIENCY VIRUS
ILRQRKIDRLI

SEQ ID NO: 8165 - protein, 9 aa, HUMAN IMMUNODEFICIENCY VIRUS
AIVVWTIVF

SEQ ID NO: 8166 - protein, 9 aa, HUMAN IMMUNODEFICIENCY VIRUS
KIDRLIDRI

SEQ ID NO: 8167 - protein, 10 aa, HUMAN IMMUNODEFICIENCY VIRUS
AIVVWTIVFI

SEQ ID NO: 8168 - protein, 8 aa, HUMAN IMMUNODEFICIENCY VIRUS
IVVWTIVF

SEQ ID NO: 8169 - protein, 8 aa, HUMAN IMMUNODEFICIENCY VIRUS
VVWTIVFI

SEQ ID NO: 8170 - protein, 8 aa, HUMAN IMMUNODEFICIENCY VIRUS
KILRQRKI

SEQ ID NO: 8171 - protein, 9 aa, HUMAN IMMUNODEFICIENCY VIRUS
IVVWTIVFI

SEQ ID NO: 8172 - protein, 9 aa, HUMAN IMMUNODEFICIENCY VIRUS
RQRKIDRLI

SEQ ID NO: 8173 - protein, 10 aa, HUMAN IMMUNODEFICIENCY VIRUS
IIAIVVWTIV

SEQ ID NO: 8174 - protein, 9 aa, HUMAN IMMUNODEFICIENCY VIRUS
IIAIVVWTI

SEQ ID NO: 8175 - protein, 8 aa, HUMAN IMMUNODEFICIENCY VIRUS
AIVVWTIV

SEQ ID NO: 8176 - protein, 8 aa, HUMAN IMMUNODEFICIENCY VIRUS
IGSGQAFY

SEQ ID NO: 8177 - protein, 9 aa, HUMAN IMMUNODEFICIENCY VIRUS
GKDLWVTVY

SEQ ID NO: 8178 - protein, 10 aa, HUMAN IMMUNODEFICIENCY VIRUS
GKDLWVTVYY

SEQ ID NO: 8179 - protein, 10 aa, HUMAN IMMUNODEFICIENCY VIRUS
NTSPRSRVAY

SEQ ID NO: 8180 - protein, 11 aa, HUMAN IMMUNODEFICIENCY VIRUS
GTAGNSSRAAY

SEQ ID NO: 8181 - protein, 9 aa, HUMAN IMMUNODEFICIENCY VIRUS
DSSNSTGNY

SEQ ID NO: 8182 - protein, 10 aa, HUMAN IMMUNODEFICIENCY VIRUS
TNSSYTNDTY

SEQ ID NO: 8183 - protein, 10 aa, HUMAN IMMUNODEFICIENCY VIRUS
WFDITNWLWY

SEQ ID NO: 8184 - protein, 11 aa, HUMAN IMMUNODEFICIENCY VIRUS
WMEWEREIDNY

SEQ ID NO: 8185 - protein, 9 aa, HUMAN IMMUNODEFICIENCY VIRUS
EWEREIDNY

SEQ ID NO: 8186 - protein, 11 aa, HUMAN IMMUNODEFICIENCY VIRUS
NMWQEVGKAMY

SEQ ID NO: 8187 - protein, 11 aa, HUMAN IMMUNODEFICIENCY VIRUS
HSFNCRGEFFY

SEQ ID NO: 8188 - protein, 9 aa, HUMAN IMMUNODEFICIENCY VIRUS
WQEVGKAMY

SEQ ID NO: 8189 - protein, 10 aa, HUMAN IMMUNODEFICIENCY VIRUS
VSFEPIPIHY

SEQ ID NO: 8190 - protein, 11 aa, HUMAN IMMUNODEFICIENCY VIRUS
KVSFEPIPIHY

SEQ ID NO: 8191 - protein, 9 aa, HUMAN IMMUNODEFICIENCY VIRUS
SFEPIPIHY

SEQ ID NO: 8192 - protein, 11 aa, HUMAN IMMUNODEFICIENCY VIRUS
LQARVLAVERY

SEQ ID NO: 8193 - protein, 11 aa, HUMAN IMMUNODEFICIENCY VIRUS
LSIVNRVRQGY

SEQ ID NO: 8194 - protein, 8 aa, HUMAN IMMUNODEFICIENCY VIRUS
RSLCLFSY

SEQ ID NO: 8195 - protein, 9 aa, HUMAN IMMUNODEFICIENCY VIRUS
LRSLCLFSY

SEQ ID NO: 8196 - protein, 11 aa, HUMAN IMMUNODEFICIENCY VIRUS
HSFNCGGEFFY

SEQ ID NO: 8197 - protein, 11 aa, HUMAN IMMUNODEFICIENCY VIRUS
DMRDNWRSELY

SEQ ID NO: 8198 - protein, 10 aa, HUMAN IMMUNODEFICIENCY VIRUS
MRDNWRSELY

SEQ ID NO: 8199 - protein, 8 aa, HUMAN IMMUNODEFICIENCY VIRUS
CASDAKAY

SEQ ID NO: 8200 - protein, 9 aa, HUMAN IMMUNODEFICIENCY VIRUS
FCASDAKAY

SEQ ID NO: 8201 - protein, 8 aa, HUMAN IMMUNODEFICIENCY VIRUS
WRSELYKY

SEQ ID NO: 8202 - protein, 8 aa, HUMAN IMMUNODEFICIENCY VIRUS
ETIDKDLY

SEQ ID NO: 8203 - protein, 8 aa, HUMAN IMMUNODEFICIENCY VIRUS
EKEEKGLY

SEQ ID NO: 8204 - protein, 10 aa, HUMAN IMMUNODEFICIENCY VIRUS
KQEPIDKELY

SEQ ID NO: 8205 - protein, 10 aa, HUMAN IMMUNODEFICIENCY VIRUS
KQETIDKDLY

SEQ ID NO: 8206 - protein, 10 aa, HUMAN IMMUNODEFICIENCY VIRUS
AADKGVSQNY

SEQ ID NO: 8207 - protein, 11 aa, HUMAN IMMUNODEFICIENCY VIRUS
ASAQQDLKGGY

SEQ ID NO: 8208 - protein, 11 aa, HUMAN IMMUNODEFICIENCY VIRUS
ATAQQDLKGGY

SEQ ID NO: 8209 - protein, 11 aa, HUMAN IMMUNODEFICIENCY VIRUS
AADKGKVSQNY

SEQ ID NO: 8210 - protein, 10 aa, HUMAN IMMUNODEFICIENCY VIRUS
EADGKVSQNY

SEQ ID NO: 8211 - protein, 10 aa, HUMAN IMMUNODEFICIENCY VIRUS
GNSSQVSQNY

SEQ ID NO: 8212 - protein, 10 aa, HUMAN IMMUNODEFICIENCY VIRUS
KQEPIDKELY

SEQ ID NO: 8213 - protein, 8 aa, HUMAN IMMUNODEFICIENCY VIRUS
SEELRSLY

SEQ ID NO: 8214 - protein, 9 aa, HUMAN IMMUNODEFICIENCY VIRUS
GSEELRSLY

SEQ ID NO: 8215 - protein, 10 aa, HUMAN IMMUNODEFICIENCY VIRUS
TGSEELRSLY

SEQ ID NO: 8216 - protein, 9 aa, HUMAN IMMUNODEFICIENCY VIRUS
NSSQVSQNY

SEQ ID NO: 8217 - protein, 8 aa, HUMAN IMMUNODEFICIENCY VIRUS
SSQVSQNY

SEQ ID NO: 8218 - protein, 11 aa, HUMAN IMMUNODEFICIENCY VIRUS
RSLYNTVATLY

SEQ ID NO: 8219 - protein, 9 aa, HUMAN IMMUNODEFICIENCY VIRUS
FRDYVDRFY

SEQ ID NO: 8220 - protein, 8 aa, HUMAN IMMUNODEFICIENCY VIRUS
PKEPFRDY

SEQ ID NO: 8221 - protein, 10 aa, HUMAN IMMUNODEFICIENCY VIRUS
HMARELHPEY

SEQ ID NO: 8222 - protein, 11 aa, HUMAN IMMUNODEFICIENCY VIRUS
HMARELHPEYY

SEQ ID NO: 8223 - protein, 9 aa, HUMAN IMMUNODEFICIENCY VIRUS
ARELHPEFY

SEQ ID NO: 8224 - protein, 9 aa, HUMAN IMMUNODEFICIENCY VIRUS
YTPGPGIRY

SEQ ID NO: 8225 - protein, 10 aa, HUMAN IMMUNODEFICIENCY VIRUS
RQDILDLWVY

SEQ ID NO: 8226 - protein, 9 aa, HUMAN IMMUNODEFICIENCY VIRUS
ARELHPEYY

SEQ ID NO: 8227 - protein, 8 aa, HUMAN IMMUNODEFICIENCY VIRUS
ARELHPEY

SEQ ID NO: 8228 - protein, 10 aa, HUMAN IMMUNODEFICIENCY VIRUS
RQEILDLWVY

SEQ ID NO: 8229 - protein, 9 aa, HUMAN IMMUNODEFICIENCY VIRUS
TWETWWTDY

SEQ ID NO: 8230 - protein, 9 aa, HUMAN IMMUNODEFICIENCY VIRUS
TWETWWTEY

SEQ ID NO: 8231 - protein, 10 aa, HUMAN IMMUNODEFICIENCY VIRUS
ETWETWWTDY

SEQ ID NO: 8232 - protein, 10 aa, HUMAN IMMUNODEFICIENCY VIRUS
ETWETWWTEY

SEQ ID NO: 8233 - protein, 8 aa, HUMAN IMMUNODEFICIENCY VIRUS
AQEDHEKY

SEQ ID NO: 8234 - protein, 10 aa, HUMAN IMMUNODEFICIENCY VIRUS
ISRIGPENPY

SEQ ID NO: 8235 - protein, 11 aa, HUMAN IMMUNODEFICIENCY VIRUS
KISRIGPENPY

SEQ ID NO: 8236 - protein, 11 aa, HUMAN IMMUNODEFICIENCY VIRUS
STNNETPGIRY

SEQ ID NO: 8237 - protein, 8 aa, HUMAN IMMUNODEFICIENCY VIRUS
KTELQAIY

SEQ ID NO: 8238 - protein, 10 aa, HUMAN IMMUNODEFICIENCY VIRUS
GQDQWTYQIY

SEQ ID NO: 8239 - protein, 10 aa, HUMAN IMMUNODEFICIENCY VIRUS
DKAQEEHERY

SEQ ID NO: 8240 - protein, 8 aa, HUMAN IMMUNODEFICIENCY VIRUS
AQEEHERY

SEQ ID NO: 8241 - protein, 9 aa, HUMAN IMMUNODEFICIENCY VIRUS
NPDIVIYQY

SEQ ID NO: 8242 - protein, 9 aa, HUMAN IMMUNODEFICIENCY VIRUS
PLDKDFRKY

SEQ ID NO: 8243 - protein, 8 aa, HUMAN IMMUNODEFICIENCY VIRUS
QQEFGIPY

SEQ ID NO: 8244 - protein, 9 aa, HUMAN IMMUNODEFICIENCY VIRUS
NPEIVIYQY

SEQ ID NO: 8245 - protein, 10 aa, HUMAN IMMUNODEFICIENCY VIRUS
DKAQEEHEKY

SEQ ID NO: 8246 - protein, 8 aa, HUMAN IMMUNODEFICIENCY VIRUS
AQEEHEKY

SEQ ID NO: 8247 - protein, 8 aa, HUMAN IMMUNODEFICIENCY VIRUS
KQEFGIPY

SEQ ID NO: 8248 - protein, 11 aa, HUMAN IMMUNODEFICIENCY VIRUS
NRETKLGKAGY

SEQ ID NO: 8249 - protein, 9 aa, HUMAN IMMUNODEFICIENCY VIRUS
ETKLGKAGY

SEQ ID NO: 8250 - protein, 10 aa, HUMAN IMMUNODEFICIENCY VIRUS
ITKIQNFRVY

SEQ ID NO: 8251 - protein, 11 aa, HUMAN IMMUNODEFICIENCY VIRUS
ITKIQNFRVYY

SEQ ID NO: 8252 - protein, 10 aa, HUMAN IMMUNODEFICIENCY VIRUS
LKEPVHGVYY

SEQ ID NO: 8253 - protein, 9 aa, HUMAN IMMUNODEFICIENCY VIRUS
LKEPVHGVY

SEQ ID NO: 8254 - protein, 9 aa, HUMAN IMMUNODEFICIENCY VIRUS
RKAKIIRDY

SEQ ID NO: 8255 - protein, 11 aa, HUMAN IMMUNODEFICIENCY VIRUS
KISKIGPENPY

SEQ ID NO: 8256 - protein, 10 aa, HUMAN IMMUNODEFICIENCY VIRUS
ISKIGPENPY

SEQ ID NO: 8257 - protein, 9 aa, HUMAN IMMUNODEFICIENCY VIRUS
NNETPGIRY

SEQ ID NO: 8258 - protein, 11 aa, HUMAN IMMUNODEFICIENCY VIRUS
NNETPGIRYQY

SEQ ID NO: 8259 - protein, 9 aa, HUMAN IMMUNODEFICIENCY VIRUS
ETPGIRYQY

SEQ ID NO: 8260 - protein, 10 aa, HUMAN IMMUNODEFICIENCY VIRUS
LVAVHVASGY

SEQ ID NO: 8261 - protein, 10 aa, HUMAN IMMUNODEFICIENCY VIRUS
VTVLDVGDAY

SEQ ID NO: 8262 - protein, 10 aa, HUMAN IMMUNODEFICIENCY VIRUS
NTPPLVKLWY

SEQ ID NO: 8263 - protein, 10 aa, HUMAN IMMUNODEFICIENCY VIRUS
PAETGQETAY

SEQ ID NO: 8264 - protein, 11 aa, HUMAN IMMUNODEFICIENCY VIRUS
IPAETGQETAY

SEQ ID NO: 8265 - protein, 8 aa, HUMAN IMMUNODEFICIENCY VIRUS
ETGQETAY

SEQ ID NO: 8266 - protein, 8 aa, HUMAN IMMUNODEFICIENCY VIRUS
VLDVGDAY

SEQ ID NO: 8267 - protein, 11 aa, HUMAN IMMUNODEFICIENCY VIRUS
QKEPPFLWMGY

SEQ ID NO: 8268 - protein, 11 aa, HUMAN IMMUNODEFICIENCY VIRUS
GVSIEWRLRRY

SEQ ID NO: 8269 - protein, 9 aa, HUMAN IMMUNODEFICIENCY VIRUS
SIEWRLRRY

SEQ ID NO: 8270 - protein, 10 aa, HUMAN IMMUNODEFICIENCY VIRUS
VSIEWRLRRY

SEQ ID NO: 8271 - protein, 11 aa, HUMAN IMMUNODEFICIENCY VIRUS
GLADQLIHMHY

SEQ ID NO: 8272 - protein, 10 aa, HUMAN IMMUNODEFICIENCY VIRUS
LADQLIHMHY

SEQ ID NO: 8273 - protein, 8 aa, HUMAN IMMUNODEFICIENCY VIRUS
IVSPRCEY

SEQ ID NO: 8274 - protein, 10 aa, HUMAN IMMUNODEFICIENCY VIRUS
LADQLIHLYY

SEQ ID NO: 8275 - protein, 9 aa, HUMAN IMMUNODEFICIENCY VIRUS
LADQLIHLY

SEQ ID NO: 8276 - protein, 9 aa, HUMAN IMMUNODEFICIENCY VIRUS
KSLVKHHMY

SEQ ID NO: 8277 - protein, 10 aa, HUMAN IMMUNODEFICIENCY VIRUS
WKSLVKHHMY

SEQ ID NO: 8278 - protein, 9 aa, HUMAN IMMUNODEFICIENCY VIRUS
NSLVKHHMY

SEQ ID NO: 8279 - protein, 10 aa, HUMAN IMMUNODEFICIENCY VIRUS
WNSLVKHHMY

SEQ ID NO: 8280 - protein, 11 aa, HUMAN IMMUNODEFICIENCY VIRUS
PEDQGPQREPY

SEQ ID NO: 8281 - protein, 8 aa, HUMAN IMMUNODEFICIENCY VIRUS
WTIVFIEY

SEQ ID NO: 8282 - protein, 8 aa, HUMAN IMMUNODEFICIENCY VIRUS
GIGPGQTF

SEQ ID NO: 8283 - protein, 8 aa, HUMAN IMMUNODEFICIENCY VIRUS
SIGSGQAF

SEQ ID NO: 8284 - protein, 8 aa, HUMAN IMMUNODEFICIENCY VIRUS
IGPGQTFY

SEQ ID NO: 8285 - protein, 8 aa, HUMAN IMMUNODEFICIENCY VIRUS
IGSGQAFY

SEQ ID NO: 8286 - protein, 8 aa, HUMAN IMMUNODEFICIENCY VIRUS
GTAGNSSR

SEQ ID NO: 8287 - protein, 8 aa, HUMAN IMMUNODEFICIENCY VIRUS
TAGNSSRA

SEQ ID NO: 8288 - protein, 8 aa, HUMAN IMMUNODEFICIENCY VIRUS
KLREIRQF

SEQ ID NO: 8289 - protein, 9 aa, HUMAN IMMUNODEFICIENCY VIRUS
ADNLWVTVY

SEQ ID NO: 8290 - protein, 9 aa, HUMAN IMMUNODEFICIENCY VIRUS
GIGPGQTFY

SEQ ID NO: 8291 - protein, 9 aa, HUMAN IMMUNODEFICIENCY VIRUS
SIGSGQAFY

SEQ ID NO: 8292 - protein, 9 aa, HUMAN IMMUNODEFICIENCY VIRUS
IGPGQTFYA

SEQ ID NO: 8293 - protein, 9 aa, HUMAN IMMUNODEFICIENCY VIRUS
GTAGNSSRA

SEQ ID NO: 8294 - protein, 9 aa, HUMAN IMMUNODEFICIENCY VIRUS
NTSPRSRVA

SEQ ID NO: 8295 - protein, 9 aa, HUMAN IMMUNODEFICIENCY VIRUS
TAGNSSRAA

SEQ ID NO: 8296 - protein, 10 aa, HUMAN IMMUNODEFICIENCY VIRUS
ADNLWVTVYY

SEQ ID NO: 8297 - protein, 10 aa, HUMAN IMMUNODEFICIENCY VIRUS
EGKNEINDTY

SEQ ID NO: 8298 - protein, 10 aa, HUMAN IMMUNODEFICIENCY VIRUS
GIGPGQTFYA

SEQ ID NO: 8299 - protein, 10 aa, HUMAN IMMUNODEFICIENCY VIRUS
GTAGNSSRAA

SEQ ID NO: 8300 - protein, 10 aa, HUMAN IMMUNODEFICIENCY VIRUS
NTSPRSRVAY

SEQ ID NO: 8301 - protein, 10 aa, HUMAN IMMUNODEFICIENCY VIRUS
TAGNSSRAAY

SEQ ID NO: 8302 - protein, 10 aa, HUMAN IMMUNODEFICIENCY VIRUS
FGLGALFLGF

SEQ ID NO: 8303 - protein, 10 aa, HUMAN IMMUNODEFICIENCY VIRUS
VGLGAVFLGF

SEQ ID NO: 8304 - protein, 11 aa, HUMAN IMMUNODEFICIENCY VIRUS
GTAGNSSRAAY

SEQ ID NO: 8305 - protein, 11 aa, HUMAN IMMUNODEFICIENCY VIRUS
KLREIRQFENK

SEQ ID NO: 8306 - protein, 8 aa, HUMAN IMMUNODEFICIENCY VIRUS
QLYATVYA

SEQ ID NO: 8307 - protein, 8 aa, HUMAN IMMUNODEFICIENCY VIRUS
IINIHTPH

SEQ ID NO: 8308 - protein, 8 aa, HUMAN IMMUNODEFICIENCY VIRUS
VISTRTHR

SEQ ID NO: 8309 - protein, 8 aa, HUMAN IMMUNODEFICIENCY VIRUS
STRTHREK

SEQ ID NO: 8310 - protein, 9 aa, HUMAN IMMUNODEFICIENCY VIRUS
NANITIPCR

SEQ ID NO: 8311 - protein, 9 aa, HUMAN IMMUNODEFICIENCY VIRUS
IINIHTPHR

SEQ ID NO: 8312 - protein, 9 aa, HUMAN IMMUNODEFICIENCY VIRUS
ISTRTHREK

SEQ ID NO: 8313 - protein, 9 aa, HUMAN IMMUNODEFICIENCY VIRUS
NIHTPHREK

SEQ ID NO: 8314 - protein, 9 aa, HUMAN IMMUNODEFICIENCY VIRUS
STRTHREKR

SEQ ID NO: 8315 - protein, 10 aa, HUMAN IMMUNODEFICIENCY VIRUS
VISTRTHREK

SEQ ID NO: 8316 - protein, 10 aa, HUMAN IMMUNODEFICIENCY VIRUS
ISTRTHREKR

SEQ ID NO: 8317 - protein, 10 aa, HUMAN IMMUNODEFICIENCY VIRUS
NIHTPHREKR

SEQ ID NO: 8318 - protein, 10 aa, HUMAN IMMUNODEFICIENCY VIRUS
STRTHREKRA

SEQ ID NO: 8319 - protein, 11 aa, HUMAN IMMUNODEFICIENCY VIRUS
HTEGNITLQCR

SEQ ID NO: 8320 - protein, 11 aa, HUMAN IMMUNODEFICIENCY VIRUS
NANITIPCRIK

SEQ ID NO: 8321 - protein, 11 aa, HUMAN IMMUNODEFICIENCY VIRUS
IINIHTPHREK

SEQ ID NO: 8322 - protein, 11 aa, HUMAN IMMUNODEFICIENCY VIRUS
VISTRTHREKR

SEQ ID NO: 8323 - protein, 11 aa, HUMAN IMMUNODEFICIENCY VIRUS
ISTRTHREKRA

SEQ ID NO: 8324 - protein, 11 aa, HUMAN IMMUNODEFICIENCY VIRUS
NIHTPHREKRA

SEQ ID NO: 8325 - protein, 8 aa, HUMAN IMMUNODEFICIENCY VIRUS
VTSTGNSA

SEQ ID NO: 8326 - protein, 9 aa, HUMAN IMMUNODEFICIENCY VIRUS
DSSNSTGNY

SEQ ID NO: 8327 - protein, 8 aa, HUMAN IMMUNODEFICIENCY VIRUS
STNGTETF

SEQ ID NO: 8328 - protein, 9 aa, HUMAN IMMUNODEFICIENCY VIRUS
STNGTETFR

SEQ ID NO: 8329 - protein, 10 aa, HUMAN IMMUNODEFICIENCY VIRUS
NDTENNTEIF

SEQ ID NO: 8330 - protein, 10 aa, HUMAN IMMUNODEFICIENCY VIRUS
NTETNKTETF

SEQ ID NO: 8331 - protein, 10 aa, HUMAN IMMUNODEFICIENCY VIRUS
NTTGNTTETF

SEQ ID NO: 8332 - protein, 11 aa, HUMAN IMMUNODEFICIENCY VIRUS
NDTENNTEIFR

SEQ ID NO: 8333 - protein, 11 aa, HUMAN IMMUNODEFICIENCY VIRUS
NTETNKTETFR

SEQ ID NO: 8334 - protein, 11 aa, HUMAN IMMUNODEFICIENCY VIRUS
NTTGNTTETFR

SEQ ID NO: 8335 - protein, 10 aa, HUMAN IMMUNODEFICIENCY VIRUS
NGSENGTETF

SEQ ID NO: 8336 - protein, 11 aa, HUMAN IMMUNODEFICIENCY VIRUS
NGSENGTETFR

SEQ ID NO: 8337 - protein, 9 aa, HUMAN IMMUNODEFICIENCY VIRUS
GSENGTETF

SEQ ID NO: 8338 - protein, 10 aa, HUMAN IMMUNODEFICIENCY VIRUS
GSENGTETFR

SEQ ID NO: 8339 - protein, 9 aa, HUMAN IMMUNODEFICIENCY VIRUS
TIGAMFLGF

SEQ ID NO: 8340 - protein, 9 aa, HUMAN IMMUNODEFICIENCY VIRUS
NDTITLPCR

SEQ ID NO: 8341 - protein, 11 aa, HUMAN IMMUNODEFICIENCY VIRUS
NDTITLPCRIK

SEQ ID NO: 8342 - protein, 9 aa, HUMAN IMMUNODEFICIENCY VIRUS
MLGAMFLGF

SEQ ID NO: 8343 - protein, 8 aa, HUMAN IMMUNODEFICIENCY VIRUS
RGWEALKY

SEQ ID NO: 8344 - protein, 11 aa, HUMAN IMMUNODEFICIENCY VIRUS
KGLRLGWEGLK

SEQ ID NO: 8345 - protein, 8 aa, HUMAN IMMUNODEFICIENCY VIRUS
LGWEGLKY

SEQ ID NO: 8346 - protein, 9 aa, HUMAN IMMUNODEFICIENCY VIRUS
RLGWEGLKY

SEQ ID NO: 8347 - protein, 11 aa, HUMAN IMMUNODEFICIENCY VIRUS
GLRLGWEGLKY

SEQ ID NO: 8348 - protein, 10 aa, HUMAN IMMUNODEFICIENCY VIRUS
LGRRGWEALK

SEQ ID NO: 8349 - protein, 11 aa, HUMAN IMMUNODEFICIENCY VIRUS
LLGRRGWEALK

SEQ ID NO: 8350 - protein, 9 aa, HUMAN IMMUNODEFICIENCY VIRUS
EIIGDIRQA

SEQ ID NO: 8351 - protein, 11 aa, HUMAN IMMUNODEFICIENCY VIRUS
LILGLVIICSA

SEQ ID NO: 8352 - protein, 11 aa, HUMAN IMMUNODEFICIENCY VIRUS
TGEIIGDIRQA

SEQ ID NO: 8353 - protein, 8 aa, HUMAN IMMUNODEFICIENCY VIRUS
RLGWEGLK

SEQ ID NO: 8354 - protein, 10 aa, HUMAN IMMUNODEFICIENCY VIRUS
GLRLGWEGLK

SEQ ID NO: 8355 - protein, 8 aa, HUMAN IMMUNODEFICIENCY VIRUS
LGRRGWEA

SEQ ID NO: 8356 - protein, 9 aa, HUMAN IMMUNODEFICIENCY VIRUS
LLGRRGWEA

SEQ ID NO: 8357 - protein, 10 aa, HUMAN IMMUNODEFICIENCY VIRUS
DIIGDIRQAH

SEQ ID NO: 8358 - protein, 10 aa, HUMAN IMMUNODEFICIENCY VIRUS
ELLGRRGWEA

SEQ ID NO: 8359 - protein, 11 aa, HUMAN IMMUNODEFICIENCY VIRUS
TGDIIGDIRQA

SEQ ID NO: 8360 - protein, 8 aa, HUMAN IMMUNODEFICIENCY VIRUS
GLVIICSA

SEQ ID NO: 8361 - protein, 8 aa, HUMAN IMMUNODEFICIENCY VIRUS
RVGQAMYA

SEQ ID NO: 8362 - protein, 8 aa, HUMAN IMMUNODEFICIENCY VIRUS
PLGVAPTR

SEQ ID NO: 8363 - protein, 8 aa, HUMAN IMMUNODEFICIENCY VIRUS
LGVAPTRA

SEQ ID NO: 8364 - protein, 8 aa, HUMAN IMMUNODEFICIENCY VIRUS
DITNWLWY

SEQ ID NO: 8365 - protein, 8 aa, HUMAN IMMUNODEFICIENCY VIRUS
RDFILIAA

SEQ ID NO: 8366 - protein, 8 aa, HUMAN IMMUNODEFICIENCY VIRUS
DFILIAAR

SEQ ID NO: 8367 - protein, 8 aa, HUMAN IMMUNODEFICIENCY VIRUS
DTIAIAVA

SEQ ID NO: 8368 - protein, 9 aa, HUMAN IMMUNODEFICIENCY VIRUS
LGLVIICSA

SEQ ID NO: 8369 - protein, 9 aa, HUMAN IMMUNODEFICIENCY VIRUS
STITQACPK

SEQ ID NO: 8370 - protein, 9 aa, HUMAN IMMUNODEFICIENCY VIRUS
IGPGQTFYA

SEQ ID NO: 8371 - protein, 9 aa, HUMAN IMMUNODEFICIENCY VIRUS
FDITNWLWY

SEQ ID NO: 8372 - protein, 9 aa, HUMAN IMMUNODEFICIENCY VIRUS
RDFILIAAR

SEQ ID NO: 8373 - protein, 9 aa, HUMAN IMMUNODEFICIENCY VIRUS
NSAVSLLNA

SEQ ID NO: 8374 - protein, 10 aa, HUMAN IMMUNODEFICIENCY VIRUS
ILGLVIICSA

SEQ ID NO: 8375 - protein, 10 aa, HUMAN IMMUNODEFICIENCY VIRUS
LLGMLMICSA

SEQ ID NO: 8376 - protein, 10 aa, HUMAN IMMUNODEFICIENCY VIRUS
PIHYCTPAGF

SEQ ID NO: 8377 - protein, 10 aa, HUMAN IMMUNODEFICIENCY VIRUS
FAILKCNDKK

SEQ ID NO: 8378 - protein, 10 aa, HUMAN IMMUNODEFICIENCY VIRUS
RIGPGQTFYA

SEQ ID NO: 8379 - protein, 10 aa, HUMAN IMMUNODEFICIENCY VIRUS
MLQLTVWGIK

SEQ ID NO: 8380 - protein, 10 aa, HUMAN IMMUNODEFICIENCY VIRUS
RVLAVERYLR

SEQ ID NO: 8381 - protein, 10 aa, HUMAN IMMUNODEFICIENCY VIRUS
WFDITNWLWY

SEQ ID NO: 8382 - protein, 10 aa, HUMAN IMMUNODEFICIENCY VIRUS
EGIEEEGGER

SEQ ID NO: 8383 - protein, 11 aa, HUMAN IMMUNODEFICIENCY VIRUS
PIHYCTPAGFA

SEQ ID NO: 8384 - protein, 11 aa, HUMAN IMMUNODEFICIENCY VIRUS
GFAILKCNDKK

SEQ ID NO: 8385 - protein, 11 aa, HUMAN IMMUNODEFICIENCY VIRUS
FAILKCNDKKF

SEQ ID NO: 8386 - protein, 11 aa, HUMAN IMMUNODEFICIENCY VIRUS
GDIIGDIRQAH

SEQ ID NO: 8387 - protein, 11 aa, HUMAN IMMUNODEFICIENCY VIRUS
NVPWNSSWSNK

SEQ ID NO: 8388 - protein, 11 aa, HUMAN IMMUNODEFICIENCY VIRUS
WMEWEREIDNY

SEQ ID NO: 8389 - protein, 11 aa, HUMAN IMMUNODEFICIENCY VIRUS
NSAVSLLNATA

SEQ ID NO: 8390 - protein, 11 aa, HUMAN IMMUNODEFICIENCY VIRUS
IAIAVAEGTDR

SEQ ID NO: 8391 - protein, 8 aa, HUMAN IMMUNODEFICIENCY VIRUS
RGWEALKY

SEQ ID NO: 8392 - protein, 9 aa, HUMAN IMMUNODEFICIENCY VIRUS
GIGAVFLGF

SEQ ID NO: 8393 - protein, 8 aa, HUMAN IMMUNODEFICIENCY VIRUS
KLWVTVYY

SEQ ID NO: 8394 - protein, 8 aa, HUMAN IMMUNODEFICIENCY VIRUS
AVGIGAVF

SEQ ID NO: 8395 - protein, 9 aa, HUMAN IMMUNODEFICIENCY VIRUS
RAVGIGAVF

SEQ ID NO: 8396 - protein, 11 aa, HUMAN IMMUNODEFICIENCY VIRUS
AVGIGAVFLGF

SEQ ID NO: 8397 - protein, 8 aa, HUMAN IMMUNODEFICIENCY VIRUS
TITQACPK

SEQ ID NO: 8398 - protein, 8 aa, HUMAN IMMUNODEFICIENCY VIRUS
YCTPAGFA

SEQ ID NO: 8399 - protein, 8 aa, HUMAN IMMUNODEFICIENCY VIRUS
RIGPGQTF

SEQ ID NO: 8400 - protein, 8 aa, HUMAN IMMUNODEFICIENCY VIRUS
IGPGQTFY

SEQ ID NO: 8401 - protein, 8 aa, HUMAN IMMUNODEFICIENCY VIRUS
LFLGFLGA

SEQ ID NO: 8402 - protein, 8 aa, HUMAN IMMUNODEFICIENCY VIRUS
LAVERYLR

SEQ ID NO: 8403 - protein, 8 aa, HUMAN IMMUNODEFICIENCY VIRUS
NLCLFSYH

SEQ ID NO: 8404 - protein, 8 aa, HUMAN IMMUNODEFICIENCY VIRUS
SAVSLLNA

SEQ ID NO: 8405 - protein, 8 aa, HUMAN IMMUNODEFICIENCY VIRUS
VSLLNATA

SEQ ID NO: 8406 - protein, 9 aa, HUMAN IMMUNODEFICIENCY VIRUS
LGMLMICSA

SEQ ID NO: 8407 - protein, 9 aa, HUMAN IMMUNODEFICIENCY VIRUS
RIGPGQTFY

SEQ ID NO: 8408 - protein, 9 aa, HUMAN IMMUNODEFICIENCY VIRUS
ITTHSFNCR

SEQ ID NO: 8409 - protein, 9 aa, HUMAN IMMUNODEFICIENCY VIRUS
NITLPCRIK

SEQ ID NO: 8410 - protein, 9 aa, HUMAN IMMUNODEFICIENCY VIRUS
ALFLGFLGA

SEQ ID NO: 8411 - protein, 9 aa, HUMAN IMMUNODEFICIENCY VIRUS
LFLGFLGAA

SEQ ID NO: 8412 - protein, 9 aa, HUMAN IMMUNODEFICIENCY VIRUS
VLAVERYLR

SEQ ID NO: 8413 - protein, 9 aa, HUMAN IMMUNODEFICIENCY VIRUS
ISNWLWYIK

SEQ ID NO: 8414 - protein, 9 aa, HUMAN IMMUNODEFICIENCY VIRUS
NLCLFSYHR

SEQ ID NO: 8415 - protein, 9 aa, HUMAN IMMUNODEFICIENCY VIRUS
AVSLLNATA

SEQ ID NO: 8416 - protein, 10 aa, HUMAN IMMUNODEFICIENCY VIRUS
GDIIGDIRQA

SEQ ID NO: 8417 - protein, 10 aa, HUMAN IMMUNODEFICIENCY VIRUS
EITTHSFNCR

SEQ ID NO: 8418 - protein, 10 aa, HUMAN IMMUNODEFICIENCY VIRUS
VGIGAVFLGF

SEQ ID NO: 8419 - protein, 10 aa, HUMAN IMMUNODEFICIENCY VIRUS
GALFLGFLGA

SEQ ID NO: 8420 - protein, 10 aa, HUMAN IMMUNODEFICIENCY VIRUS
ALFLGFLGAA

SEQ ID NO: 8421 - protein, 10 aa, HUMAN IMMUNODEFICIENCY VIRUS
SAVSLLNATA

SEQ ID NO: 8422 - protein, 10 aa, HUMAN IMMUNODEFICIENCY VIRUS
VSLLNATAIA

SEQ ID NO: 8423 - protein, 11 aa, HUMAN IMMUNODEFICIENCY VIRUS
YATGDIIGDIR

SEQ ID NO: 8424 - protein, 11 aa, HUMAN IMMUNODEFICIENCY VIRUS
GALFLGFLGAA

SEQ ID NO: 8425 - protein, 11 aa, HUMAN IMMUNODEFICIENCY VIRUS
ISNWLWYIKIF

SEQ ID NO: 8426 - protein, 11 aa, HUMAN IMMUNODEFICIENCY VIRUS
DLRNLCLFSYH

SEQ ID NO: 8427 - protein, 11 aa, HUMAN IMMUNODEFICIENCY VIRUS
NLCLFSYHRLR

SEQ ID NO: 8428 - protein, 11 aa, HUMAN IMMUNODEFICIENCY VIRUS
AVSLLNATAIA

SEQ ID NO: 8429 - protein, 11 aa, HUMAN IMMUNODEFICIENCY VIRUS
PTRIRQGLERA

SEQ ID NO: 8430 - protein, 9 aa, HUMAN IMMUNODEFICIENCY VIRUS
TGDIIGDIR

SEQ ID NO: 8431 - protein, 9 aa, HUMAN IMMUNODEFICIENCY VIRUS
DIIGDIRQA

SEQ ID NO: 8432 - protein, 8 aa, HUMAN IMMUNODEFICIENCY VIRUS
EAQQHLLK

SEQ ID NO: 8433 - protein, 8 aa, HUMAN IMMUNODEFICIENCY VIRUS
GMLMICSA

SEQ ID NO: 8434 - protein, 8 aa, HUMAN IMMUNODEFICIENCY VIRUS
ILKCNDKK

SEQ ID NO: 8435 - protein, 8 aa, HUMAN IMMUNODEFICIENCY VIRUS
TTHSFNCR

SEQ ID NO: 8436 - protein, 8 aa, HUMAN IMMUNODEFICIENCY VIRUS
IGAVFLGF

SEQ ID NO: 8437 - protein, 8 aa, HUMAN IMMUNODEFICIENCY VIRUS
MTWMEWER

SEQ ID NO: 8438 - protein, 8 aa, HUMAN IMMUNODEFICIENCY VIRUS
GGERDRDR

SEQ ID NO: 8439 - protein, 9 aa, HUMAN IMMUNODEFICIENCY VIRUS
AILKCNDKK

SEQ ID NO: 8440 - protein, 9 aa, HUMAN IMMUNODEFICIENCY VIRUS
ILKCNDKKF

SEQ ID NO: 8441 - protein, 9 aa, HUMAN IMMUNODEFICIENCY VIRUS
LAEEEVVIR

SEQ ID NO: 8442 - protein, 9 aa, HUMAN IMMUNODEFICIENCY VIRUS
AMFLGFLGA

SEQ ID NO: 8443 - protein, 9 aa, HUMAN IMMUNODEFICIENCY VIRUS
NMTWMEWER

SEQ ID NO: 8444 - protein, 9 aa, HUMAN IMMUNODEFICIENCY VIRUS
GIEEEGGER

SEQ ID NO: 8445 - protein, 9 aa, HUMAN IMMUNODEFICIENCY VIRUS
EGGERDRDR

SEQ ID NO: 8446 - protein, 9 aa, HUMAN IMMUNODEFICIENCY VIRUS
RSIRLVNGF

SEQ ID NO: 8447 - protein, 9 aa, HUMAN IMMUNODEFICIENCY VIRUS
WGQELKNSA

SEQ ID NO: 8448 - protein, 9 aa, HUMAN IMMUNODEFICIENCY VIRUS
WSQELKNSA

SEQ ID NO: 8449 - protein, 10 aa, HUMAN IMMUNODEFICIENCY VIRUS
KTTLFCASDA

SEQ ID NO: 8450 - protein, 10 aa, HUMAN IMMUNODEFICIENCY VIRUS
AILKCNDKKF

SEQ ID NO: 8451 - protein, 10 aa, HUMAN IMMUNODEFICIENCY VIRUS
SLAEEEVVIR

SEQ ID NO: 8452 - protein, 10 aa, HUMAN IMMUNODEFICIENCY VIRUS
ATGDIIGDIR

SEQ ID NO: 8453 - protein, 10 aa, HUMAN IMMUNODEFICIENCY VIRUS
IINMWQEVGK

SEQ ID NO: 8454 - protein, 10 aa, HUMAN IMMUNODEFICIENCY VIRUS
GAMFLGFLGA

SEQ ID NO: 8455 - protein, 10 aa, HUMAN IMMUNODEFICIENCY VIRUS
AMFLGFLGAA

SEQ ID NO: 8456 - protein, 10 aa, HUMAN IMMUNODEFICIENCY VIRUS
AIEAQQHLLK

SEQ ID NO: 8457 - protein, 10 aa, HUMAN IMMUNODEFICIENCY VIRUS
QDLLALDKWA

SEQ ID NO: 8458 - protein, 10 aa, HUMAN IMMUNODEFICIENCY VIRUS
SIRLVSGFLA

SEQ ID NO: 8459 - protein, 10 aa, HUMAN IMMUNODEFICIENCY VIRUS
LLQYWSQELK

SEQ ID NO: 8460 - protein, 10 aa, HUMAN IMMUNODEFICIENCY VIRUS
AILHIPRRIR

SEQ ID NO: 8461 - protein, 10 aa, HUMAN IMMUNODEFICIENCY VIRUS
PTRIRQGLER

SEQ ID NO: 8462 - protein, 11 aa, HUMAN IMMUNODEFICIENCY VIRUS
KTTLFCASDAK

SEQ ID NO: 8463 - protein, 11 aa, HUMAN IMMUNODEFICIENCY VIRUS
GSLAEEEVVIR

SEQ ID NO: 8464 - protein, 11 aa, HUMAN IMMUNODEFICIENCY VIRUS
TTHSFNCRGEF

SEQ ID NO: 8465 - protein, 11 aa, HUMAN IMMUNODEFICIENCY VIRUS
QIINMWQEVGK

SEQ ID NO: 8466 - protein, 11 aa, HUMAN IMMUNODEFICIENCY VIRUS
IINMWQEVGKA

SEQ ID NO: 8467 - protein, 11 aa, HUMAN IMMUNODEFICIENCY VIRUS
GAMFLGFLGAA

SEQ ID NO: 8468 - protein, 11 aa, HUMAN IMMUNODEFICIENCY VIRUS
ITKWLWYIKIF

SEQ ID NO: 8469 - protein, 11 aa, HUMAN IMMUNODEFICIENCY VIRUS
GIEEEGGERDR

SEQ ID NO: 8470 - protein, 11 aa, HUMAN IMMUNODEFICIENCY VIRUS
RSIRLVSGFLA

SEQ ID NO: 8471 - protein, 11 aa, HUMAN IMMUNODEFICIENCY VIRUS
NLLQYWSQELK

SEQ ID NO: 8472 - protein, 11 aa, HUMAN IMMUNODEFICIENCY VIRUS
RAILHIPRRIR

SEQ ID NO: 8473 - protein, 8 aa, HUMAN IMMUNODEFICIENCY VIRUS
NTSVITQA

SEQ ID NO: 8474 - protein, 8 aa, HUMAN IMMUNODEFICIENCY VIRUS
SVEINCTR

SEQ ID NO: 8475 - protein, 8 aa, HUMAN IMMUNODEFICIENCY VIRUS
GDIIGDIR

SEQ ID NO: 8476 - protein, 8 aa, HUMAN IMMUNODEFICIENCY VIRUS
MFLGFLGA

SEQ ID NO: 8477 - protein, 8 aa, HUMAN IMMUNODEFICIENCY VIRUS
KLTVWGIK

SEQ ID NO: 8478 - protein, 8 aa, HUMAN IMMUNODEFICIENCY VIRUS
SIRLVNGF

SEQ ID NO: 8479 - protein, 8 aa, HUMAN IMMUNODEFICIENCY VIRUS
SIRLVSGF

SEQ ID NO: 8480 - protein, 8 aa, HUMAN IMMUNODEFICIENCY VIRUS
RLVNGFLA

SEQ ID NO: 8481 - protein, 8 aa, HUMAN IMMUNODEFICIENCY VIRUS
RAILHIPR

SEQ ID NO: 8482 - protein, 8 aa, HUMAN IMMUNODEFICIENCY VIRUS
AILHIPRR

SEQ ID NO: 8483 - protein, 9 aa, HUMAN IMMUNODEFICIENCY VIRUS
KAKRRVVQR

SEQ ID NO: 8484 - protein, 9 aa, HUMAN IMMUNODEFICIENCY VIRUS
MFLGFLGAA

SEQ ID NO: 8485 - protein, 9 aa, HUMAN IMMUNODEFICIENCY VIRUS
RSIRLVSGF

SEQ ID NO: 8486 - protein, 9 aa, HUMAN IMMUNODEFICIENCY VIRUS
RAILHIPRR

SEQ ID NO: 8487 - protein, 9 aa, HUMAN IMMUNODEFICIENCY VIRUS
ILHIPRRIR

SEQ ID NO: 8488 - protein, 10 aa, HUMAN IMMUNODEFICIENCY VIRUS
SGGDPEIVMH

SEQ ID NO: 8489 - protein, 10 aa, HUMAN IMMUNODEFICIENCY VIRUS
LLKLTVWGIK

SEQ ID NO: 8490 - protein, 11 aa, HUMAN IMMUNODEFICIENCY VIRUS
NTSVITQACPK

SEQ ID NO: 8491 - protein, 11 aa, HUMAN IMMUNODEFICIENCY VIRUS
CTNVSTVQCTH

SEQ ID NO: 8492 - protein, 11 aa, HUMAN IMMUNODEFICIENCY VIRUS
SSGGDLEITTH

SEQ ID NO: 8493 - protein, 11 aa, HUMAN IMMUNODEFICIENCY VIRUS
SSGGDPEIVMH

SEQ ID NO: 8494 - protein, 11 aa, HUMAN IMMUNODEFICIENCY VIRUS
VMHSFNCGGEF

SEQ ID NO: 8495 - protein, 11 aa, HUMAN IMMUNODEFICIENCY VIRUS
PTKAKRRVVQR

SEQ ID NO: 8496 - protein, 11 aa, HUMAN IMMUNODEFICIENCY VIRUS
KAKRRVVQREK

SEQ ID NO: 8497 - protein, 11 aa, HUMAN IMMUNODEFICIENCY VIRUS
HLLKLTVWGIK

SEQ ID NO: 8498 - protein, 11 aa, HUMAN IMMUNODEFICIENCY VIRUS
VGGLIGLRIIF

SEQ ID NO: 8499 - protein, 11 aa, HUMAN IMMUNODEFICIENCY VIRUS
SLLNATAIAVA

SEQ ID NO: 8500 - protein, 9 aa, HUMAN IMMUNODEFICIENCY VIRUS
TGEIIGDIR

SEQ ID NO: 8501 - protein, 8 aa, HUMAN IMMUNODEFICIENCY VIRUS
NTSAITQA

SEQ ID NO: 8502 - protein, 8 aa, HUMAN IMMUNODEFICIENCY VIRUS
AITQACPK

SEQ ID NO: 8503 - protein, 8 aa, HUMAN IMMUNODEFICIENCY VIRUS
GDPEIVMH

SEQ ID NO: 8504 - protein, 8 aa, HUMAN IMMUNODEFICIENCY VIRUS
QDLLALDK

SEQ ID NO: 8505 - protein, 8 aa, HUMAN IMMUNODEFICIENCY VIRUS
NATAIAVA

SEQ ID NO: 8506 - protein, 9 aa, HUMAN IMMUNODEFICIENCY VIRUS
SAITQACPK

SEQ ID NO: 8507 - protein, 9 aa, HUMAN IMMUNODEFICIENCY VIRUS
FAILKCNDK

SEQ ID NO: 8508 - protein, 9 aa, HUMAN IMMUNODEFICIENCY VIRUS
GGDPEIVMH

SEQ ID NO: 8509 - protein, 9 aa, HUMAN IMMUNODEFICIENCY VIRUS
TITLPCRIK

SEQ ID NO: 8510 - protein, 9 aa, HUMAN IMMUNODEFICIENCY VIRUS
SLLNATAIA

SEQ ID NO: 8511 - protein, 10 aa, HUMAN IMMUNODEFICIENCY VIRUS
NCNTSAITQA

SEQ ID NO: 8512 - protein, 10 aa, HUMAN IMMUNODEFICIENCY VIRUS
TSAITQACPK

SEQ ID NO: 8513 - protein, 10 aa, HUMAN IMMUNODEFICIENCY VIRUS
TSVITQACPK

SEQ ID NO: 8514 - protein, 10 aa, HUMAN IMMUNODEFICIENCY VIRUS
GFAILKCNDK

SEQ ID NO: 8515 - protein, 10 aa, HUMAN IMMUNODEFICIENCY VIRUS
GDPEIVMHSF

SEQ ID NO: 8516 - protein, 10 aa, HUMAN IMMUNODEFICIENCY VIRUS
IFAVLSIVNR

SEQ ID NO: 8517 - protein, 10 aa, HUMAN IMMUNODEFICIENCY VIRUS
LLNATAIAVA

SEQ ID NO: 8518 - protein, 11 aa, HUMAN IMMUNODEFICIENCY VIRUS
NTSAITQACPK

SEQ ID NO: 8519 - protein, 11 aa, HUMAN IMMUNODEFICIENCY VIRUS
VITQACPKVSF

SEQ ID NO: 8520 - protein, 11 aa, HUMAN IMMUNODEFICIENCY VIRUS
AGFAILKCNDK

SEQ ID NO: 8521 - protein, 11 aa, HUMAN IMMUNODEFICIENCY VIRUS
GGDPEIVMHSF

SEQ ID NO: 8522 - protein, 11 aa, HUMAN IMMUNODEFICIENCY VIRUS
ITNWLWYIKIF

SEQ ID NO: 8523 - protein, 11 aa, HUMAN IMMUNODEFICIENCY VIRUS
IIFAVLSIVNR

SEQ ID NO: 8524 - protein, 11 aa, HUMAN IMMUNODEFICIENCY VIRUS
KIEPLGVAPTK

SEQ ID NO: 8525 - protein, 8 aa, HUMAN IMMUNODEFICIENCY VIRUS
FDPIPIHY

SEQ ID NO: 8526 - protein, 8 aa, HUMAN IMMUNODEFICIENCY VIRUS
PAGYAILK

SEQ ID NO: 8527 - protein, 8 aa, HUMAN IMMUNODEFICIENCY VIRUS
NMWQEVGK

SEQ ID NO: 8528 - protein, 8 aa, HUMAN IMMUNODEFICIENCY VIRUS
LLNATAIA

SEQ ID NO: 8529 - protein, 9 aa, HUMAN IMMUNODEFICIENCY VIRUS
NMWQEVGKA

SEQ ID NO: 8530 - protein, 9 aa, HUMAN IMMUNODEFICIENCY VIRUS
DLLALDKWA

SEQ ID NO: 8531 - protein, 9 aa, HUMAN IMMUNODEFICIENCY VIRUS
ITNWLWYIK

SEQ ID NO: 8532 - protein, 9 aa, HUMAN IMMUNODEFICIENCY VIRUS
GLIGLRIIF

SEQ ID NO: 8533 - protein, 9 aa, HUMAN IMMUNODEFICIENCY VIRUS
DDLRNLCLF

SEQ ID NO: 8534 - protein, 10 aa, HUMAN IMMUNODEFICIENCY VIRUS
SGGDLEITTH

SEQ ID NO: 8535 - protein, 10 aa, HUMAN IMMUNODEFICIENCY VIRUS
IFRPGGGDMR

SEQ ID NO: 8536 - protein, 10 aa, HUMAN IMMUNODEFICIENCY VIRUS
GGLIGLRIIF

SEQ ID NO: 8537 - protein, 10 aa, HUMAN IMMUNODEFICIENCY VIRUS
GLIGLRIIFA

SEQ ID NO: 8538 - protein, 10 aa, HUMAN IMMUNODEFICIENCY VIRUS
WDDLRNLCLF

SEQ ID NO: 8539 - protein, 11 aa, HUMAN IMMUNODEFICIENCY VIRUS
NMWQEVGKAMY

SEQ ID NO: 8540 - protein, 11 aa, HUMAN IMMUNODEFICIENCY VIRUS
EIFRPGGGDMR

SEQ ID NO: 8541 - protein, 11 aa, HUMAN IMMUNODEFICIENCY VIRUS
GGLIGLRIIFA

SEQ ID NO: 8542 - protein, 11 aa, HUMAN IMMUNODEFICIENCY VIRUS
DDLRNLCLFSY

SEQ ID NO: 8543 - protein, 8 aa, HUMAN IMMUNODEFICIENCY VIRUS
SFNCRGEF

SEQ ID NO: 8544 - protein, 8 aa, HUMAN IMMUNODEFICIENCY VIRUS
LIGLRIIF

SEQ ID NO: 8545 - protein, 8 aa, HUMAN IMMUNODEFICIENCY VIRUS
VSGFLALA

SEQ ID NO: 8546 - protein, 9 aa, HUMAN IMMUNODEFICIENCY VIRUS
HSFNCRGEF

SEQ ID NO: 8547 - protein, 9 aa, HUMAN IMMUNODEFICIENCY VIRUS
SFNCRGEFF

SEQ ID NO: 8548 - protein, 9 aa, HUMAN IMMUNODEFICIENCY VIRUS
ITKWLWYIK

SEQ ID NO: 8549 - protein, 9 aa, HUMAN IMMUNODEFICIENCY VIRUS
LIGLRIIFA

SEQ ID NO: 8550 - protein, 9 aa, HUMAN IMMUNODEFICIENCY VIRUS
LVSGFLALA

SEQ ID NO: 8551 - protein, 10 aa, HUMAN IMMUNODEFICIENCY VIRUS
HSFNCRGEFF

SEQ ID NO: 8552 - protein, 10 aa, HUMAN IMMUNODEFICIENCY VIRUS
SFNCRGEFFY

SEQ ID NO: 8553 - protein, 10 aa, HUMAN IMMUNODEFICIENCY VIRUS
RLVSGFLALA

SEQ ID NO: 8554 - protein, 10 aa, HUMAN IMMUNODEFICIENCY VIRUS
DLRNLCLFSY

SEQ ID NO: 8555 - protein, 11 aa, HUMAN IMMUNODEFICIENCY VIRUS
TTHSFNCGGEF

SEQ ID NO: 8556 - protein, 11 aa, HUMAN IMMUNODEFICIENCY VIRUS
HSFNCRGEFFY

SEQ ID NO: 8557 - protein, 9 aa, HUMAN IMMUNODEFICIENCY VIRUS
RLINCNTSA

SEQ ID NO: 8558 - protein, 8 aa, HUMAN IMMUNODEFICIENCY VIRUS
KAYDTEVH

SEQ ID NO: 8559 - protein, 8 aa, HUMAN IMMUNODEFICIENCY VIRUS
LINCNTSA

SEQ ID NO: 8560 - protein, 8 aa, HUMAN IMMUNODEFICIENCY VIRUS
VITQACPK

SEQ ID NO: 8561 - protein, 8 aa, HUMAN IMMUNODEFICIENCY VIRUS
RVVQREKR

SEQ ID NO: 8562 - protein, 8 aa, HUMAN IMMUNODEFICIENCY VIRUS
VVQREKRA

SEQ ID NO: 8563 - protein, 8 aa, HUMAN IMMUNODEFICIENCY VIRUS
IGLRIIFA

SEQ ID NO: 8564 - protein, 8 aa, HUMAN IMMUNODEFICIENCY VIRUS
DLRNLCLF

SEQ ID NO: 8565 - protein, 9 aa, HUMAN IMMUNODEFICIENCY VIRUS
SVITQACPK

SEQ ID NO: 8566 - protein, 9 aa, HUMAN IMMUNODEFICIENCY VIRUS
VAPTKAKRR

SEQ ID NO: 8567 - protein, 9 aa, HUMAN IMMUNODEFICIENCY VIRUS
RVVQREKRA

SEQ ID NO: 8568 - protein, 10 aa, HUMAN IMMUNODEFICIENCY VIRUS
DAKAYDTEVH

SEQ ID NO: 8569 - protein, 10 aa, HUMAN IMMUNODEFICIENCY VIRUS
YDTEVHNVWA

SEQ ID NO: 8570 - protein, 10 aa, HUMAN IMMUNODEFICIENCY VIRUS
GVAPTKAKRR

SEQ ID NO: 8571 - protein, 10 aa, HUMAN IMMUNODEFICIENCY VIRUS
VFAVLSIVNR

SEQ ID NO: 8572 - protein, 11 aa, HUMAN IMMUNODEFICIENCY VIRUS
SDAKAYDTEVH

SEQ ID NO: 8573 - protein, 11 aa, HUMAN IMMUNODEFICIENCY VIRUS
DTEVHNVWATH

SEQ ID NO: 8574 - protein, 11 aa, HUMAN IMMUNODEFICIENCY VIRUS
NCTRPNNNTRK

SEQ ID NO: 8575 - protein, 11 aa, HUMAN IMMUNODEFICIENCY VIRUS
LGVAPTKAKRR

SEQ ID NO: 8576 - protein, 11 aa, HUMAN IMMUNODEFICIENCY VIRUS
IVFAVLSIVNR

SEQ ID NO: 8577 - protein, 8 aa, HUMAN IMMUNODEFICIENCY VIRUS
PIHYCTPA

SEQ ID NO: 8578 - protein, 8 aa, HUMAN IMMUNODEFICIENCY VIRUS
EVGKAMYA

SEQ ID NO: 8579 - protein, 9 aa, HUMAN IMMUNODEFICIENCY VIRUS
DTEVHNVWA

SEQ ID NO: 8580 - protein, 9 aa, HUMAN IMMUNODEFICIENCY VIRUS
VLAVERYLK

SEQ ID NO: 8581 - protein, 9 aa, HUMAN IMMUNODEFICIENCY VIRUS
ELLELDKWA

SEQ ID NO: 8582 - protein, 9 aa, HUMAN IMMUNODEFICIENCY VIRUS
FSYHRLRDF

SEQ ID NO: 8583 - protein, 10 aa, HUMAN IMMUNODEFICIENCY VIRUS
PIPIHYCTPA

SEQ ID NO: 8584 - protein, 10 aa, HUMAN IMMUNODEFICIENCY VIRUS
RVLAVERYLK

SEQ ID NO: 8585 - protein, 10 aa, HUMAN IMMUNODEFICIENCY VIRUS
LFSYHRLRDF

SEQ ID NO: 8586 - protein, 11 aa, HUMAN IMMUNODEFICIENCY VIRUS
CLFSYHRLRDF

SEQ ID NO: 8587 - protein, 8 aa, HUMAN IMMUNODEFICIENCY VIRUS
NCRGEFFY

SEQ ID NO: 8588 - protein, 8 aa, HUMAN IMMUNODEFICIENCY VIRUS
GVAPTKAK

SEQ ID NO: 8589 - protein, 8 aa, HUMAN IMMUNODEFICIENCY VIRUS
VAPTKAKR

SEQ ID NO: 8590 - protein, 8 aa, HUMAN IMMUNODEFICIENCY VIRUS
VFLGFLGA

SEQ ID NO: 8591 - protein, 8 aa, HUMAN IMMUNODEFICIENCY VIRUS
LLALDKWA

SEQ ID NO: 8592 - protein, 9 aa, HUMAN IMMUNODEFICIENCY VIRUS
LGVAPTKAK

SEQ ID NO: 8593 - protein, 9 aa, HUMAN IMMUNODEFICIENCY VIRUS
GVAPTKAKR

SEQ ID NO: 8594 - protein, 9 aa, HUMAN IMMUNODEFICIENCY VIRUS
AVFLGFLGA

SEQ ID NO: 8595 - protein, 9 aa, HUMAN IMMUNODEFICIENCY VIRUS
VFLGFLGAA

SEQ ID NO: 8596 - protein, 9 aa, HUMAN IMMUNODEFICIENCY VIRUS
SGKLICTTA

SEQ ID NO: 8597 - protein, 10 aa, HUMAN IMMUNODEFICIENCY VIRUS
PLGVAPTKAK

SEQ ID NO: 8598 - protein, 10 aa, HUMAN IMMUNODEFICIENCY VIRUS
LGVAPTKAKR

SEQ ID NO: 8599 - protein, 10 aa, HUMAN IMMUNODEFICIENCY VIRUS
GAVFLGFLGA

SEQ ID NO: 8600 - protein, 10 aa, HUMAN IMMUNODEFICIENCY VIRUS
AVFLGFLGAA

SEQ ID NO: 8601 - protein, 10 aa, HUMAN IMMUNODEFICIENCY VIRUS
CSGKLICTTA

SEQ ID NO: 8602 - protein, 11 aa, HUMAN IMMUNODEFICIENCY VIRUS
SSNITGLLLTR

SEQ ID NO: 8603 - protein, 11 aa, HUMAN IMMUNODEFICIENCY VIRUS
PLGVAPTKAKR

SEQ ID NO: 8604 - protein, 11 aa, HUMAN IMMUNODEFICIENCY VIRUS
GAVFLGFLGAA

SEQ ID NO: 8605 - protein, 11 aa, HUMAN IMMUNODEFICIENCY VIRUS
GCSGKLICTTA

SEQ ID NO: 8606 - protein, 8 aa, HUMAN IMMUNODEFICIENCY VIRUS
AILKCNDK

SEQ ID NO: 8607 - protein, 8 aa, HUMAN IMMUNODEFICIENCY VIRUS
RLVSGFLA

SEQ ID NO: 8608 - protein, 11 aa, HUMAN IMMUNODEFICIENCY VIRUS
ETFRPGGGDMR

SEQ ID NO: 8609 - protein, 11 aa, HUMAN IMMUNODEFICIENCY VIRUS
LIEESQNQQEK

SEQ ID NO: 8610 - protein, 8 aa, HUMAN IMMUNODEFICIENCY VIRUS
GDLEITTH

SEQ ID NO: 8611 - protein, 8 aa, HUMAN IMMUNODEFICIENCY VIRUS
YCNTSGLF

SEQ ID NO: 8612 - protein, 8 aa, HUMAN IMMUNODEFICIENCY VIRUS
LLELDKWA

SEQ ID NO: 8613 - protein, 9 aa, HUMAN IMMUNODEFICIENCY VIRUS
GGDLEITTH

SEQ ID NO: 8614 - protein, 9 aa, HUMAN IMMUNODEFICIENCY VIRUS
DLEITTHSF

SEQ ID NO: 8615 - protein, 9 aa, HUMAN IMMUNODEFICIENCY VIRUS
LIGLRIVFA

SEQ ID NO: 8616 - protein, 10 aa, HUMAN IMMUNODEFICIENCY VIRUS
GDLEITTHSF

SEQ ID NO: 8617 - protein, 10 aa, HUMAN IMMUNODEFICIENCY VIRUS
FFYCNTSGLF

SEQ ID NO: 8618 - protein, 10 aa, HUMAN IMMUNODEFICIENCY VIRUS
GLIGLRIVFA

SEQ ID NO: 8619 - protein, 11 aa, HUMAN IMMUNODEFICIENCY VIRUS
SFEPIPIHYCA

SEQ ID NO: 8620 - protein, 11 aa, HUMAN IMMUNODEFICIENCY VIRUS
GGDLEITTHSF

SEQ ID NO: 8621 - protein, 11 aa, HUMAN IMMUNODEFICIENCY VIRUS
EFFYCNTSGLF

SEQ ID NO: 8622 - protein, 11 aa, HUMAN IMMUNODEFICIENCY VIRUS
GGLIGLRIVFA

SEQ ID NO: 8623 - protein, 11 aa, HUMAN IMMUNODEFICIENCY VIRUS
TAIAVAEGTDR

SEQ ID NO: 8624 - protein, 8 aa, HUMAN IMMUNODEFICIENCY VIRUS
IGLRIVFA

SEQ ID NO: 8625 - protein, 8 aa, HUMAN IMMUNODEFICIENCY VIRUS
RIVELLGR

SEQ ID NO: 8626 - protein, 8 aa, HUMAN IMMUNODEFICIENCY VIRUS
IVELLGRR

SEQ ID NO: 8627 - protein, 9 aa, HUMAN IMMUNODEFICIENCY VIRUS
RIVELLGRR

SEQ ID NO: 8628 - protein, 10 aa, HUMAN IMMUNODEFICIENCY VIRUS
NCTRPNNNTR

SEQ ID NO: 8629 - protein, 10 aa, HUMAN IMMUNODEFICIENCY VIRUS
CTRPNNNTRK

SEQ ID NO: 8630 - protein, 11 aa, HUMAN IMMUNODEFICIENCY VIRUS
PVWKEATTTLF

SEQ ID NO: 8631 - protein, 11 aa, HUMAN IMMUNODEFICIENCY VIRUS
TTTLFCASDAK

SEQ ID NO: 8632 - protein, 8 aa, HUMAN IMMUNODEFICIENCY VIRUS
KIEPLGVA

SEQ ID NO: 8633 - protein, 8 aa, HUMAN IMMUNODEFICIENCY VIRUS
LGVAPTKA

SEQ ID NO: 8634 - protein, 9 aa, HUMAN IMMUNODEFICIENCY VIRUS
TVQCTHGIR

SEQ ID NO: 8635 - protein, 9 aa, HUMAN IMMUNODEFICIENCY VIRUS
PLGVAPTKA

SEQ ID NO: 8636 - protein, 10 aa, HUMAN IMMUNODEFICIENCY VIRUS
STVQCTHGIR

SEQ ID NO: 8637 - protein, 10 aa, HUMAN IMMUNODEFICIENCY VIRUS
VVKIEPLGVA

SEQ ID NO: 8638 - protein, 10 aa, HUMAN IMMUNODEFICIENCY VIRUS
QSNLLRAIEA

SEQ ID NO: 8639 - protein, 11 aa, HUMAN IMMUNODEFICIENCY VIRUS
ATTTLFCASDA

SEQ ID NO: 8640 - protein, 11 aa, HUMAN IMMUNODEFICIENCY VIRUS
VSTVQCTHGIR

SEQ ID NO: 8641 - protein, 11 aa, HUMAN IMMUNODEFICIENCY VIRUS
KVVKIEPLGVA

SEQ ID NO: 8642 - protein, 8 aa, HUMAN IMMUNODEFICIENCY VIRUS
ATTTLFCA

SEQ ID NO: 8643 - protein, 9 aa, HUMAN IMMUNODEFICIENCY VIRUS
EATTTLFCA

SEQ ID NO: 8644 - protein, 10 aa, HUMAN IMMUNODEFICIENCY VIRUS
TTTLFCASDA

SEQ ID NO: 8645 - protein, 10 aa, HUMAN IMMUNODEFICIENCY VIRUS
TFRPGGGDMR

SEQ ID NO: 8646 - protein, 8 aa, HUMAN IMMUNODEFICIENCY VIRUS
ALAWDDLR

SEQ ID NO: 8647 - protein, 9 aa, HUMAN IMMUNODEFICIENCY VIRUS
LALAWDDLR

SEQ ID NO: 8648 - protein, 10 aa, HUMAN IMMUNODEFICIENCY VIRUS
IVQQQNNLLR

SEQ ID NO: 8649 - protein, 10 aa, HUMAN IMMUNODEFICIENCY VIRUS
FLALAWDDLR

SEQ ID NO: 8650 - protein, 11 aa, HUMAN IMMUNODEFICIENCY VIRUS
GIVQQQNNLLR

SEQ ID NO: 8651 - protein, 11 aa, HUMAN IMMUNODEFICIENCY VIRUS
IVQQQNNLLRA

SEQ ID NO: 8652 - protein, 11 aa, HUMAN IMMUNODEFICIENCY VIRUS
GFLALAWDDLR

SEQ ID NO: 8653 - protein, 8 aa, HUMAN IMMUNODEFICIENCY VIRUS
ITLPCRIK

SEQ ID NO: 8654 - protein, 8 aa, HUMAN IMMUNODEFICIENCY VIRUS
PLGVAPTK

SEQ ID NO: 8655 - protein, 8 aa, HUMAN IMMUNODEFICIENCY VIRUS
LAVERYLK

SEQ ID NO: 8656 - protein, 10 aa, HUMAN IMMUNODEFICIENCY VIRUS
IVQQQSNLLR

SEQ ID NO: 8657 - protein, 11 aa, HUMAN IMMUNODEFICIENCY VIRUS
GIVQQQSNLLR

SEQ ID NO: 8658 - protein, 11 aa, HUMAN IMMUNODEFICIENCY VIRUS
IVQQQSNLLRA

SEQ ID NO: 8659 - protein, 11 aa, HUMAN IMMUNODEFICIENCY VIRUS
LDKWASLWNWF

SEQ ID NO: 8660 - protein, 9 aa, HUMAN IMMUNODEFICIENCY VIRUS
IIGDIRQAH

SEQ ID NO: 8661 - protein, 8 aa, HUMAN IMMUNODEFICIENCY VIRUS
ESQNQQEK

SEQ ID NO: 8662 - protein, 10 aa, HUMAN IMMUNODEFICIENCY VIRUS
PIHYCAPAGF

SEQ ID NO: 8663 - protein, 11 aa, HUMAN IMMUNODEFICIENCY VIRUS
PIHYCAPAGFA

SEQ ID NO: 8664 - protein, 11 aa, HUMAN IMMUNODEFICIENCY VIRUS
VGGLIGLRIVF

SEQ ID NO: 8665 - protein, 8 aa, HUMAN IMMUNODEFICIENCY VIRUS
IGDIRQAH

SEQ ID NO: 8666 - protein, 8 aa, HUMAN IMMUNODEFICIENCY VIRUS
YCAPAGFA

SEQ ID NO: 8667 - protein, 9 aa, HUMAN IMMUNODEFICIENCY VIRUS
TVQCTHGIK

SEQ ID NO: 8668 - protein, 9 aa, HUMAN IMMUNODEFICIENCY VIRUS
CTRPNNNTR

SEQ ID NO: 8669 - protein, 9 aa, HUMAN IMMUNODEFICIENCY VIRUS
ASITLTVQA

SEQ ID NO: 8670 - protein, 10 aa, HUMAN IMMUNODEFICIENCY VIRUS
VSFEPIPIHY

SEQ ID NO: 8671 - protein, 10 aa, HUMAN IMMUNODEFICIENCY VIRUS
STVQCTHGIK

SEQ ID NO: 8672 - protein, 10 aa, HUMAN IMMUNODEFICIENCY VIRUS
AASITLTVQA

SEQ ID NO: 8673 - protein, 10 aa, HUMAN IMMUNODEFICIENCY VIRUS
ASITLTVQAR

SEQ ID NO: 8674 - protein, 11 aa, HUMAN IMMUNODEFICIENCY VIRUS
KVSFEPIPIHY

SEQ ID NO: 8675 - protein, 11 aa, HUMAN IMMUNODEFICIENCY VIRUS
YCAPAGFAILK

SEQ ID NO: 8676 - protein, 11 aa, HUMAN IMMUNODEFICIENCY VIRUS
VSTVQCTHGIK

SEQ ID NO: 8677 - protein, 11 aa, HUMAN IMMUNODEFICIENCY VIRUS
GAASITLTVQA

SEQ ID NO: 8678 - protein, 11 aa, HUMAN IMMUNODEFICIENCY VIRUS
AASITLTVQAR

SEQ ID NO: 8679 - protein, 8 aa, HUMAN IMMUNODEFICIENCY VIRUS
LIGLRIVF

SEQ ID NO: 8680 - protein, 9 aa, HUMAN IMMUNODEFICIENCY VIRUS
VSFEPIPIH

SEQ ID NO: 8681 - protein, 9 aa, HUMAN IMMUNODEFICIENCY VIRUS
GLIGLRIVF

SEQ ID NO: 8682 - protein, 10 aa, HUMAN IMMUNODEFICIENCY VIRUS
ITQACPKVSF

SEQ ID NO: 8683 - protein, 10 aa, HUMAN IMMUNODEFICIENCY VIRUS
KVSFEPIPIH

SEQ ID NO: 8684 - protein, 10 aa, HUMAN IMMUNODEFICIENCY VIRUS
CAPAGFAILK

SEQ ID NO: 8685 - protein, 10 aa, HUMAN IMMUNODEFICIENCY VIRUS
GGLIGLRIVF

SEQ ID NO: 8686 - protein, 11 aa, HUMAN IMMUNODEFICIENCY VIRUS
RSELYKYKVVK

SEQ ID NO: 8687 - protein, 8 aa, HUMAN IMMUNODEFICIENCY VIRUS
IIGDIRQA

SEQ ID NO: 8688 - protein, 8 aa, HUMAN IMMUNODEFICIENCY VIRUS
WASLWNWF

SEQ ID NO: 8689 - protein, 8 aa, HUMAN IMMUNODEFICIENCY VIRUS
AVLSIVNR

SEQ ID NO: 8690 - protein, 8 aa, HUMAN IMMUNODEFICIENCY VIRUS
AVAEGTDR

SEQ ID NO: 8691 - protein, 9 aa, HUMAN IMMUNODEFICIENCY VIRUS
VTENFNMWK

SEQ ID NO: 8692 - protein, 9 aa, HUMAN IMMUNODEFICIENCY VIRUS
SFEPIPIHY

SEQ ID NO: 8693 - protein, 9 aa, HUMAN IMMUNODEFICIENCY VIRUS
FAVLSIVNR

SEQ ID NO: 8694 - protein, 9 aa, HUMAN IMMUNODEFICIENCY VIRUS
SLCLFSYHR

SEQ ID NO: 8695 - protein, 9 aa, HUMAN IMMUNODEFICIENCY VIRUS
IAVAEGTDR

SEQ ID NO: 8696 - protein, 10 aa, HUMAN IMMUNODEFICIENCY VIRUS
NVTENFNMWK

SEQ ID NO: 8697 - protein, 10 aa, HUMAN IMMUNODEFICIENCY VIRUS
AVLSIVNRVR

SEQ ID NO: 8698 - protein, 10 aa, HUMAN IMMUNODEFICIENCY VIRUS
RSLCLFSYHR

SEQ ID NO: 8699 - protein, 10 aa, HUMAN IMMUNODEFICIENCY VIRUS
AIAVAEGTDR

SEQ ID NO: 8700 - protein, 11 aa, HUMAN IMMUNODEFICIENCY VIRUS
FAVLSIVNRVR

SEQ ID NO: 8701 - protein, 11 aa, HUMAN IMMUNODEFICIENCY VIRUS
DDLRSLCLFSY

SEQ ID NO: 8702 - protein, 11 aa, HUMAN IMMUNODEFICIENCY VIRUS
SLCLFSYHRLR

SEQ ID NO: 8703 - protein, 9 aa, HUMAN IMMUNODEFICIENCY VIRUS
ELYKYKVVK

SEQ ID NO: 8704 - protein, 8 aa, HUMAN IMMUNODEFICIENCY VIRUS
RVVEREKR

SEQ ID NO: 8705 - protein, 8 aa, HUMAN IMMUNODEFICIENCY VIRUS
VVEREKRA

SEQ ID NO: 8706 - protein, 8 aa, HUMAN IMMUNODEFICIENCY VIRUS
SITLTVQA

SEQ ID NO: 8707 - protein, 8 aa, HUMAN IMMUNODEFICIENCY VIRUS
ITLTVQAR

SEQ ID NO: 8708 - protein, 8 aa, HUMAN IMMUNODEFICIENCY VIRUS
SLCLFSYH

SEQ ID NO: 8709 - protein, 9 aa, HUMAN IMMUNODEFICIENCY VIRUS
RVVEREKRA

SEQ ID NO: 8710 - protein, 9 aa, HUMAN IMMUNODEFICIENCY VIRUS
SITLTVQAR

SEQ ID NO: 8711 - protein, 9 aa, HUMAN IMMUNODEFICIENCY VIRUS
RSLCLFSYH

SEQ ID NO: 8712 - protein, 11 aa, HUMAN IMMUNODEFICIENCY VIRUS
DLRSLCLFSYH

SEQ ID NO: 8713 - protein, 8 aa, HUMAN IMMUNODEFICIENCY VIRUS
SFEPIPIH

SEQ ID NO: 8714 - protein, 8 aa, HUMAN IMMUNODEFICIENCY VIRUS
RVLAVERY

SEQ ID NO: 8715 - protein, 9 aa, HUMAN IMMUNODEFICIENCY VIRUS
QARVLAVER

SEQ ID NO: 8716 - protein, 9 aa, HUMAN IMMUNODEFICIENCY VIRUS
DDLRSLCLF

SEQ ID NO: 8717 - protein, 10 aa, HUMAN IMMUNODEFICIENCY VIRUS
QARVLAVERY

SEQ ID NO: 8718 - protein, 10 aa, HUMAN IMMUNODEFICIENCY VIRUS
WDDLRSLCLF

SEQ ID NO: 8719 - protein, 11 aa, HUMAN IMMUNODEFICIENCY VIRUS
QLQARVLAVER

SEQ ID NO: 8720 - protein, 11 aa, HUMAN IMMUNODEFICIENCY VIRUS
IMIVGGLIGLR

SEQ ID NO: 8721 - protein, 8 aa, HUMAN IMMUNODEFICIENCY VIRUS
GVPVWKEA

SEQ ID NO: 8722 - protein, 9 aa, HUMAN IMMUNODEFICIENCY VIRUS
YGVPVWKEA

SEQ ID NO: 8723 - protein, 9 aa, HUMAN IMMUNODEFICIENCY VIRUS
RIRQGLERA

SEQ ID NO: 8724 - protein, 10 aa, HUMAN IMMUNODEFICIENCY VIRUS
LLQLTVWGIK

SEQ ID NO: 8725 - protein, 11 aa, HUMAN IMMUNODEFICIENCY VIRUS
HLLQLTVWGIK

SEQ ID NO: 8726 - protein, 11 aa, HUMAN IMMUNODEFICIENCY VIRUS
LSIVNRVRQGY

SEQ ID NO: 8727 - protein, 8 aa, HUMAN IMMUNODEFICIENCY VIRUS
NLWVTVYY

SEQ ID NO: 8728 - protein, 8 aa, HUMAN IMMUNODEFICIENCY VIRUS
NCGGEFFY

SEQ ID NO: 8729 - protein, 8 aa, HUMAN IMMUNODEFICIENCY VIRUS
RSLCLFSY

SEQ ID NO: 8730 - protein, 9 aa, HUMAN IMMUNODEFICIENCY VIRUS
EVHNVWATH

SEQ ID NO: 8731 - protein, 9 aa, HUMAN IMMUNODEFICIENCY VIRUS
SFNCGGEFF

SEQ ID NO: 8732 - protein, 9 aa, HUMAN IMMUNODEFICIENCY VIRUS
NITGLLLTR

SEQ ID NO: 8733 - protein, 10 aa, HUMAN IMMUNODEFICIENCY VIRUS
EVHNVWATHA

SEQ ID NO: 8734 - protein, 10 aa, HUMAN IMMUNODEFICIENCY VIRUS
HSFNCGGEFF

SEQ ID NO: 8735 - protein, 10 aa, HUMAN IMMUNODEFICIENCY VIRUS
SFNCGGEFFY

SEQ ID NO: 8736 - protein, 10 aa, HUMAN IMMUNODEFICIENCY VIRUS
DLRSLCLFSY

SEQ ID NO: 8737 - protein, 11 aa, HUMAN IMMUNODEFICIENCY VIRUS
HSFNCGGEFFY

SEQ ID NO: 8738 - protein, 8 aa, HUMAN IMMUNODEFICIENCY VIRUS
SFNCGGEF

SEQ ID NO: 8739 - protein, 9 aa, HUMAN IMMUNODEFICIENCY VIRUS
HSFNCGGEF

SEQ ID NO: 8740 - protein, 10 aa, HUMAN IMMUNODEFICIENCY VIRUS
PIPIHYCAPA

SEQ ID NO: 8741 - protein, 10 aa, HUMAN IMMUNODEFICIENCY VIRUS
GGGDMRDNWR

SEQ ID NO: 8742 - protein, 10 aa, HUMAN IMMUNODEFICIENCY VIRUS
MIVGGLIGLR

SEQ ID NO: 8743 - protein, 10 aa, HUMAN IMMUNODEFICIENCY VIRUS
SIVNRVRQGY

SEQ ID NO: 8744 - protein, 11 aa, HUMAN IMMUNODEFICIENCY VIRUS
PGGGDMRDNWR

SEQ ID NO: 8745 - protein, 8 aa, HUMAN IMMUNODEFICIENCY VIRUS
PIHYCAPA

SEQ ID NO: 8746 - protein, 8 aa, HUMAN IMMUNODEFICIENCY VIRUS
ITGLLLTR

SEQ ID NO: 8747 - protein, 11 aa, HUMAN IMMUNODEFICIENCY VIRUS
DMRDNWRSELY

SEQ ID NO: 8748 - protein, 8 aa, HUMAN IMMUNODEFICIENCY VIRUS
PAGFAILK

SEQ ID NO: 8749 - protein, 8 aa, HUMAN IMMUNODEFICIENCY VIRUS
LSIVNRVR

SEQ ID NO: 8750 - protein, 8 aa, HUMAN IMMUNODEFICIENCY VIRUS
DLRSLCLF

SEQ ID NO: 8751 - protein, 9 aa, HUMAN IMMUNODEFICIENCY VIRUS
VLSIVNRVR

SEQ ID NO: 8752 - protein, 9 aa, HUMAN IMMUNODEFICIENCY VIRUS
IVNRVRQGY

SEQ ID NO: 8753 - protein, 10 aa, HUMAN IMMUNODEFICIENCY VIRUS
IISLWDQSLK

SEQ ID NO: 8754 - protein, 11 aa, HUMAN IMMUNODEFICIENCY VIRUS
DIISLWDQSLK

SEQ ID NO: 8755 - protein, 8 aa, HUMAN IMMUNODEFICIENCY VIRUS
GDMRDNWR

SEQ ID NO: 8756 - protein, 9 aa, HUMAN IMMUNODEFICIENCY VIRUS
GGDMRDNWR

SEQ ID NO: 8757 - protein, 8 aa, HUMAN IMMUNODEFICIENCY VIRUS
QACPKVSF

SEQ ID NO: 8758 - protein, 8 aa, HUMAN IMMUNODEFICIENCY VIRUS
PIPIHYCA

SEQ ID NO: 8759 - protein, 9 aa, HUMAN IMMUNODEFICIENCY VIRUS
RDNWRSELY

SEQ ID NO: 8760 - protein, 10 aa, HUMAN IMMUNODEFICIENCY VIRUS
RDNWRSELYK

SEQ ID NO: 8761 - protein, 11 aa, HUMAN IMMUNODEFICIENCY VIRUS
TLFCASDAKAY

SEQ ID NO: 8762 - protein, 11 aa, HUMAN IMMUNODEFICIENCY VIRUS
RDNWRSELYKY

SEQ ID NO: 8763 - protein, 11 aa, HUMAN IMMUNODEFICIENCY VIRUS
GIKQLQARVLA

SEQ ID NO: 8764 - protein, 8 aa, HUMAN IMMUNODEFICIENCY VIRUS
QLQARVLA

SEQ ID NO: 8765 - protein, 10 aa, HUMAN IMMUNODEFICIENCY VIRUS
TVYYGVPVWK

SEQ ID NO: 8766 - protein, 11 aa, HUMAN IMMUNODEFICIENCY VIRUS
VTVYYGVPVWK

SEQ ID NO: 8767 - protein, 8 aa, HUMAN IMMUNODEFICIENCY VIRUS
CASDAKAY

SEQ ID NO: 8768 - protein, 8 aa, HUMAN IMMUNODEFICIENCY VIRUS
LCLFSYHR

SEQ ID NO: 8769 - protein, 9 aa, HUMAN IMMUNODEFICIENCY VIRUS
FCASDAKAY

SEQ ID NO: 8770 - protein, 9 aa, HUMAN IMMUNODEFICIENCY VIRUS
IVGGLIGLR

SEQ ID NO: 8771 - protein, 9 aa, HUMAN IMMUNODEFICIENCY VIRUS
CLFSYHRLR

SEQ ID NO: 8772 - protein, 10 aa, HUMAN IMMUNODEFICIENCY VIRUS
LFCASDAKAY

SEQ ID NO: 8773 - protein, 10 aa, HUMAN IMMUNODEFICIENCY VIRUS
GAAGSTMGAA

SEQ ID NO: 8774 - protein, 10 aa, HUMAN IMMUNODEFICIENCY VIRUS
LCLFSYHRLR

SEQ ID NO: 8775 - protein, 11 aa, HUMAN IMMUNODEFICIENCY VIRUS
LGAAGSTMGAA

SEQ ID NO: 8776 - protein, 8 aa, HUMAN IMMUNODEFICIENCY VIRUS
VGGLIGLR

SEQ ID NO: 8777 - protein, 8 aa, HUMAN IMMUNODEFICIENCY VIRUS
QLTVWGIK

SEQ ID NO: 8778 - protein, 8 aa, HUMAN IMMUNODEFICIENCY VIRUS
LFSYHRLR

SEQ ID NO: 8779 - protein, 8 aa, HUMAN IMMUNODEFICIENCY VIRUS
RIRQGLER

SEQ ID NO: 8780 - protein, 11 aa, HUMAN IMMUNODEFICIENCY VIRUS
TTLFCASDAKA

SEQ ID NO: 8781 - protein, 9 aa, HUMAN IMMUNODEFICIENCY VIRUS
AAGSTMGAA

SEQ ID NO: 8782 - protein, 10 aa, HUMAN IMMUNODEFICIENCY VIRUS
TLFCASDAKA

SEQ ID NO: 8783 - protein, 8 aa, HUMAN IMMUNODEFICIENCY VIRUS
SLWDQSLK

SEQ ID NO: 8784 - protein, 9 aa, HUMAN IMMUNODEFICIENCY VIRUS
ISLWDQSLK

SEQ ID NO: 8785 - protein, 10 aa, HUMAN IMMUNODEFICIENCY VIRUS
WDQSLKPCVK

SEQ ID NO: 8786 - protein, 11 aa, HUMAN IMMUNODEFICIENCY VIRUS
RVRQGYSPLSF

SEQ ID NO: 8787 - protein, 8 aa, HUMAN IMMUNODEFICIENCY VIRUS
QSLKPCVK

SEQ ID NO: 8788 - protein, 8 aa, HUMAN IMMUNODEFICIENCY VIRUS
FLGFLGAA

SEQ ID NO: 8789 - protein, 8 aa, HUMAN IMMUNODEFICIENCY VIRUS
QGYSPLSF

SEQ ID NO: 8790 - protein, 11 aa, HUMAN IMMUNODEFICIENCY VIRUS
TVWGIKQLQAR

SEQ ID NO: 8791 - protein, 8 aa, HUMAN IMMUNODEFICIENCY VIRUS
GIKQLQAR

SEQ ID NO: 8792 - protein, 9 aa, HUMAN IMMUNODEFICIENCY VIRUS
WGIKQLQAR

SEQ ID NO: 8793 - protein, 10 aa, HUMAN IMMUNODEFICIENCY VIRUS
TVWGIKQLQA

SEQ ID NO: 8794 - protein, 11 aa, HUMAN IMMUNODEFICIENCY VIRUS
LTVWGIKQLQA

SEQ ID NO: 8795 - protein, 8 aa, HUMAN IMMUNODEFICIENCY VIRUS
FCASDAKA

SEQ ID NO: 8796 - protein, 8 aa, HUMAN IMMUNODEFICIENCY VIRUS
AGSTMGAA

SEQ ID NO: 8797 - protein, 8 aa, HUMAN IMMUNODEFICIENCY VIRUS
WLWYIKIF

SEQ ID NO: 8798 - protein, 9 aa, HUMAN IMMUNODEFICIENCY VIRUS
LFCASDAKA

SEQ ID NO: 8799 - protein, 9 aa, HUMAN IMMUNODEFICIENCY VIRUS
LGIWGCSGK

SEQ ID NO: 8800 - protein, 10 aa, HUMAN IMMUNODEFICIENCY VIRUS
TTLFCASDAK

SEQ ID NO: 8801 - protein, 10 aa, HUMAN IMMUNODEFICIENCY VIRUS
LLGIWGCSGK

SEQ ID NO: 8802 - protein, 11 aa, HUMAN IMMUNODEFICIENCY VIRUS
NLLRAIEAQQH

SEQ ID NO: 8803 - protein, 11 aa, HUMAN IMMUNODEFICIENCY VIRUS
QLLGIWGCSGK

SEQ ID NO: 8804 - protein, 8 aa, HUMAN IMMUNODEFICIENCY VIRUS
VSTVQCTH

SEQ ID NO: 8805 - protein, 8 aa, HUMAN IMMUNODEFICIENCY VIRUS
NLLRAIEA

SEQ ID NO: 8806 - protein, 8 aa, HUMAN IMMUNODEFICIENCY VIRUS
RAIEAQQH

SEQ ID NO: 8807 - protein, 8 aa, HUMAN IMMUNODEFICIENCY VIRUS
WGIKQLQA

SEQ ID NO: 8808 - protein, 9 aa, HUMAN IMMUNODEFICIENCY VIRUS
NVSTVQCTH

SEQ ID NO: 8809 - protein, 10 aa, HUMAN IMMUNODEFICIENCY VIRUS
LLRAIEAQQH

SEQ ID NO: 8810 - protein, 8 aa, HUMAN IMMUNODEFICIENCY VIRUS
GIWGCSGK

SEQ ID NO: 8811 - protein, 9 aa, HUMAN IMMUNODEFICIENCY VIRUS
TTLFCASDA

SEQ ID NO: 8812 - protein, 9 aa, HUMAN IMMUNODEFICIENCY VIRUS
TLFCASDAK

SEQ ID NO: 8813 - protein, 8 aa, HUMAN IMMUNODEFICIENCY VIRUS
TLFCASDA

SEQ ID NO: 8814 - protein, 8 aa, HUMAN IMMUNODEFICIENCY VIRUS
RSELYKYK

SEQ ID NO: 8815 - protein, 8 aa, HUMAN IMMUNODEFICIENCY VIRUS
LLLNGSLA

SEQ ID NO: 8816 - protein, 9 aa, HUMAN IMMUNODEFICIENCY VIRUS
QLLLNGSLA

SEQ ID NO: 8817 - protein, 9 aa, HUMAN IMMUNODEFICIENCY VIRUS
GAAGSTMGA

SEQ ID NO: 8818 - protein, 10 aa, HUMAN IMMUNODEFICIENCY VIRUS
LGAAGSTMGA

SEQ ID NO: 8819 - protein, 11 aa, HUMAN IMMUNODEFICIENCY VIRUS
STQLLLNGSLA

SEQ ID NO: 8820 - protein, 11 aa, HUMAN IMMUNODEFICIENCY VIRUS
FLGAAGSTMGA

SEQ ID NO: 8821 - protein, 8 aa, HUMAN IMMUNODEFICIENCY VIRUS
LFCASDAK

SEQ ID NO: 8822 - protein, 8 aa, HUMAN IMMUNODEFICIENCY VIRUS
AAGSTMGA

SEQ ID NO: 8823 - protein, 8 aa, HUMAN IMMUNODEFICIENCY VIRUS
EDTSARQA

SEQ ID NO: 8824 - protein, 8 aa, HUMAN IMMUNODEFICIENCY VIRUS
AAAIMMQK

SEQ ID NO: 8825 - protein, 8 aa, HUMAN IMMUNODEFICIENCY VIRUS
SATIMMQR

SEQ ID NO: 8826 - protein, 8 aa, HUMAN IMMUNODEFICIENCY VIRUS
TAPPPESF

SEQ ID NO: 8827 - protein, 8 aa, HUMAN IMMUNODEFICIENCY VIRUS
KDKDKELY

SEQ ID NO: 8828 - protein, 8 aa, HUMAN IMMUNODEFICIENCY VIRUS
ETIDKDLY

SEQ ID NO: 8829 - protein, 9 aa, HUMAN IMMUNODEFICIENCY VIRUS
NSATIMMQR

SEQ ID NO: 8830 - protein, 9 aa, HUMAN IMMUNODEFICIENCY VIRUS
PTAPPPESF

SEQ ID NO: 8831 - protein, 9 aa, HUMAN IMMUNODEFICIENCY VIRUS
TAPPPESFR

SEQ ID NO: 8832 - protein, 10 aa, HUMAN IMMUNODEFICIENCY VIRUS
NGKQANFLGK

SEQ ID NO: 8833 - protein, 10 aa, HUMAN IMMUNODEFICIENCY VIRUS
NGRQANFLGK

SEQ ID NO: 8834 - protein, 10 aa, HUMAN IMMUNODEFICIENCY VIRUS
PTAPPPESFR

SEQ ID NO: 8835 - protein, 10 aa, HUMAN IMMUNODEFICIENCY VIRUS
TAPPPESFRF

SEQ ID NO: 8836 - protein, 10 aa, HUMAN IMMUNODEFICIENCY VIRUS
TIDKDLYPLA

SEQ ID NO: 8837 - protein, 11 aa, HUMAN IMMUNODEFICIENCY VIRUS
AAAIMMQKSNF

SEQ ID NO: 8838 - protein, 11 aa, HUMAN IMMUNODEFICIENCY VIRUS
SATIMMQRGNF

SEQ ID NO: 8839 - protein, 11 aa, HUMAN IMMUNODEFICIENCY VIRUS
NGKQANFLGKY

SEQ ID NO: 8840 - protein, 11 aa, HUMAN IMMUNODEFICIENCY VIRUS
NGRQANFLGKY

SEQ ID NO: 8841 - protein, 11 aa, HUMAN IMMUNODEFICIENCY VIRUS
PTAPPPESFRF

SEQ ID NO: 8842 - protein, 11 aa, HUMAN IMMUNODEFICIENCY VIRUS
KDKDKELYPLA

SEQ ID NO: 8843 - protein, 11 aa, HUMAN IMMUNODEFICIENCY VIRUS
ETIDKDLYPLA

SEQ ID NO: 8844 - protein, 8 aa, HUMAN IMMUNODEFICIENCY VIRUS
PAAADKEK

SEQ ID NO: 8845 - protein, 8 aa, HUMAN IMMUNODEFICIENCY VIRUS
ASAQQDLK

SEQ ID NO: 8846 - protein, 8 aa, HUMAN IMMUNODEFICIENCY VIRUS
ATAQQDLK

SEQ ID NO: 8847 - protein, 9 aa, HUMAN IMMUNODEFICIENCY VIRUS
PAEPTAPPA

SEQ ID NO: 8848 - protein, 10 aa, HUMAN IMMUNODEFICIENCY VIRUS
AADKGVSQNY

SEQ ID NO: 8849 - protein, 10 aa, HUMAN IMMUNODEFICIENCY VIRUS
SAQQDLKGGY

SEQ ID NO: 8850 - protein, 10 aa, HUMAN IMMUNODEFICIENCY VIRUS
TAQQDLKGGY

SEQ ID NO: 8851 - protein, 10 aa, HUMAN IMMUNODEFICIENCY VIRUS
GTRPGNYVQK

SEQ ID NO: 8852 - protein, 10 aa, HUMAN IMMUNODEFICIENCY VIRUS
GTRPGNYVQR

SEQ ID NO: 8853 - protein, 10 aa, HUMAN IMMUNODEFICIENCY VIRUS
ITSLPKQEQK

SEQ ID NO: 8854 - protein, 11 aa, HUMAN IMMUNODEFICIENCY VIRUS
PAAADKEKDSK

SEQ ID NO: 8855 - protein, 11 aa, HUMAN IMMUNODEFICIENCY VIRUS
GANSIPVGDIY

SEQ ID NO: 8856 - protein, 11 aa, HUMAN IMMUNODEFICIENCY VIRUS
ASAQQDLKGGY

SEQ ID NO: 8857 - protein, 11 aa, HUMAN IMMUNODEFICIENCY VIRUS
ATAQQDLKGGY

SEQ ID NO: 8858 - protein, 11 aa, HUMAN IMMUNODEFICIENCY VIRUS
EITSLPKQEQK

SEQ ID NO: 8859 - protein, 8 aa, HUMAN IMMUNODEFICIENCY VIRUS
YTAVFMQR

SEQ ID NO: 8860 - protein, 8 aa, HUMAN IMMUNODEFICIENCY VIRUS
TAPPAESF

SEQ ID NO: 8861 - protein, 9 aa, HUMAN IMMUNODEFICIENCY VIRUS
PTAPPAESF

SEQ ID NO: 8862 - protein, 9 aa, HUMAN IMMUNODEFICIENCY VIRUS
TAPPAESFR

SEQ ID NO: 8863 - protein, 10 aa, HUMAN IMMUNODEFICIENCY VIRUS
PTAPPAESFR

SEQ ID NO: 8864 - protein, 10 aa, HUMAN IMMUNODEFICIENCY VIRUS
TAPPAESFRF

SEQ ID NO: 8865 - protein, 11 aa, HUMAN IMMUNODEFICIENCY VIRUS
PTAPPAESFRF

SEQ ID NO: 8866 - protein, 10 aa, HUMAN IMMUNODEFICIENCY VIRUS
EGRQANFLGK

SEQ ID NO: 8867 - protein, 11 aa, HUMAN IMMUNODEFICIENCY VIRUS
AADKGKVSQNY

SEQ ID NO: 8868 - protein, 10 aa, HUMAN IMMUNODEFICIENCY VIRUS
EADGKVSQNY

SEQ ID NO: 8869 - protein, 8 aa, HUMAN IMMUNODEFICIENCY VIRUS
AAAIMMQK

SEQ ID NO: 8870 - protein, 10 aa, HUMAN IMMUNODEFICIENCY VIRUS
AAIMMQKSNF

SEQ ID NO: 8871 - protein, 11 aa, HUMAN IMMUNODEFICIENCY VIRUS
AAIMMQKSNFK

SEQ ID NO: 8872 - protein, 10 aa, HUMAN IMMUNODEFICIENCY VIRUS
KTVKCFNCGK

SEQ ID NO: 8873 - protein, 9 aa, HUMAN IMMUNODEFICIENCY VIRUS
NIMMQRGNF

SEQ ID NO: 8874 - protein, 8 aa, HUMAN IMMUNODEFICIENCY VIRUS
GARASILR

SEQ ID NO: 8875 - protein, 8 aa, HUMAN IMMUNODEFICIENCY VIRUS
PGNFPQSR

SEQ ID NO: 8876 - protein, 9 aa, HUMAN IMMUNODEFICIENCY VIRUS
MGARASILR

SEQ ID NO: 8877 - protein, 9 aa, HUMAN IMMUNODEFICIENCY VIRUS
KIWPSSKGR

SEQ ID NO: 8878 - protein, 11 aa, HUMAN IMMUNODEFICIENCY VIRUS
TGNSSQVSQNY

SEQ ID NO: 8879 - protein, 11 aa, HUMAN IMMUNODEFICIENCY VIRUS
NFLGKIWPSSK

SEQ ID NO: 8880 - protein, 11 aa, HUMAN IMMUNODEFICIENCY VIRUS
NFLQNRPEPTA

SEQ ID NO: 8881 - protein, 8 aa, HUMAN IMMUNODEFICIENCY VIRUS
PVAPGQMR

SEQ ID NO: 8882 - protein, 8 aa, HUMAN IMMUNODEFICIENCY VIRUS
MMQKSNFK

SEQ ID NO: 8883 - protein, 8 aa, HUMAN IMMUNODEFICIENCY VIRUS
MMQRGNFK

SEQ ID NO: 8884 - protein, 9 aa, HUMAN IMMUNODEFICIENCY VIRUS
KLDKWEKIR

SEQ ID NO: 8885 - protein, 9 aa, HUMAN IMMUNODEFICIENCY VIRUS
GGKKKYKLK

SEQ ID NO: 8886 - protein, 9 aa, HUMAN IMMUNODEFICIENCY VIRUS
RDTKEALDK

SEQ ID NO: 8887 - protein, 9 aa, HUMAN IMMUNODEFICIENCY VIRUS
ALSPRTLNA

SEQ ID NO: 8888 - protein, 9 aa, HUMAN IMMUNODEFICIENCY VIRUS
IMMQKSNFK

SEQ ID NO: 8889 - protein, 9 aa, HUMAN IMMUNODEFICIENCY VIRUS
LGKIWPSSK

SEQ ID NO: 8890 - protein, 10 aa, HUMAN IMMUNODEFICIENCY VIRUS
PGGKKKYKLK

SEQ ID NO: 8891 - protein, 10 aa, HUMAN IMMUNODEFICIENCY VIRUS
GGKKKYKLKH

SEQ ID NO: 8892 - protein, 10 aa, HUMAN IMMUNODEFICIENCY VIRUS
QALSPRTLNA

SEQ ID NO: 8893 - protein, 10 aa, HUMAN IMMUNODEFICIENCY VIRUS
AGPVAPGQMR

SEQ ID NO: 8894 - protein, 10 aa, HUMAN IMMUNODEFICIENCY VIRUS
GASLEEMMTA

SEQ ID NO: 8895 - protein, 10 aa, HUMAN IMMUNODEFICIENCY VIRUS
FLGKIWPSSK

SEQ ID NO: 8896 - protein, 10 aa, HUMAN IMMUNODEFICIENCY VIRUS
FLQNRPEPTA

SEQ ID NO: 8897 - protein, 10 aa, HUMAN IMMUNODEFICIENCY VIRUS
TAPPAESFGF

SEQ ID NO: 8898 - protein, 11 aa, HUMAN IMMUNODEFICIENCY VIRUS
KLDKWEKIRLR

SEQ ID NO: 8899 - protein, 11 aa, HUMAN IMMUNODEFICIENCY VIRUS
PGGKKKYKLKH

SEQ ID NO: 8900 - protein, 11 aa, HUMAN IMMUNODEFICIENCY VIRUS
LGKIWPSSKGR

SEQ ID NO: 8901 - protein, 11 aa, HUMAN IMMUNODEFICIENCY VIRUS
PTAPPAESFGF

SEQ ID NO: 8902 - protein, 10 aa, HUMAN IMMUNODEFICIENCY VIRUS
ATIMMQRGNF

SEQ ID NO: 8903 - protein, 11 aa, HUMAN IMMUNODEFICIENCY VIRUS
ATIMMQRGNFR

SEQ ID NO: 8904 - protein, 10 aa, HUMAN IMMUNODEFICIENCY VIRUS
PSQKQEPIDK

SEQ ID NO: 8905 - protein, 9 aa, HUMAN IMMUNODEFICIENCY VIRUS
SSKGRPGNF

SEQ ID NO: 8906 - protein, 10 aa, HUMAN IMMUNODEFICIENCY VIRUS
TTSTLQEQIA

SEQ ID NO: 8907 - protein, 8 aa, HUMAN IMMUNODEFICIENCY VIRUS
DVKDTKEA

SEQ ID NO: 8908 - protein, 8 aa, HUMAN IMMUNODEFICIENCY VIRUS
PIPVGDIY

SEQ ID NO: 8909 - protein, 8 aa, HUMAN IMMUNODEFICIENCY VIRUS
SLEEMMTA

SEQ ID NO: 8910 - protein, 8 aa, HUMAN IMMUNODEFICIENCY VIRUS
MSQVTNSA

SEQ ID NO: 8911 - protein, 8 aa, HUMAN IMMUNODEFICIENCY VIRUS
IMMQKSNF

SEQ ID NO: 8912 - protein, 9 aa, HUMAN IMMUNODEFICIENCY VIRUS
IDVKDTKEA

SEQ ID NO: 8913 - protein, 9 aa, HUMAN IMMUNODEFICIENCY VIRUS
ASLEEMMTA

SEQ ID NO: 8914 - protein, 9 aa, HUMAN IMMUNODEFICIENCY VIRUS
AMSQVTNSA

SEQ ID NO: 8915 - protein, 9 aa, HUMAN IMMUNODEFICIENCY VIRUS
TIKCFNCGK

SEQ ID NO: 8916 - protein, 9 aa, HUMAN IMMUNODEFICIENCY VIRUS
TVKCFNCGK

SEQ ID NO: 8917 - protein, 10 aa, HUMAN IMMUNODEFICIENCY VIRUS
EAMSQVTNSA

SEQ ID NO: 8918 - protein, 10 aa, HUMAN IMMUNODEFICIENCY VIRUS
PSSKGRPGNF

SEQ ID NO: 8919 - protein, 11 aa, HUMAN IMMUNODEFICIENCY VIRUS
GTTSTLQEQIA

SEQ ID NO: 8920 - protein, 10 aa, HUMAN IMMUNODEFICIENCY VIRUS
TIMMQRGNFR

SEQ ID NO: 8921 - protein, 8 aa, HUMAN IMMUNODEFICIENCY VIRUS
QTGSEELR

SEQ ID NO: 8922 - protein, 10 aa, HUMAN IMMUNODEFICIENCY VIRUS
KSKKKAQQAA

SEQ ID NO: 8923 - protein, 11 aa, HUMAN IMMUNODEFICIENCY VIRUS
KSKKKAQQAAA

SEQ ID NO: 8924 - protein, 8 aa, HUMAN IMMUNODEFICIENCY VIRUS
PGGKKKYK

SEQ ID NO: 8925 - protein, 8 aa, HUMAN IMMUNODEFICIENCY VIRUS
TLYCVHQK

SEQ ID NO: 8926 - protein, 8 aa, HUMAN IMMUNODEFICIENCY VIRUS
DTKEALEK

SEQ ID NO: 8927 - protein, 8 aa, HUMAN IMMUNODEFICIENCY VIRUS
MLNIVGGH

SEQ ID NO: 8928 - protein, 8 aa, HUMAN IMMUNODEFICIENCY VIRUS
NIVGGHQA

SEQ ID NO: 8929 - protein, 8 aa, HUMAN IMMUNODEFICIENCY VIRUS
IVGGHQAA

SEQ ID NO: 8930 - protein, 8 aa, HUMAN IMMUNODEFICIENCY VIRUS
STLQEQIA

SEQ ID NO: 8931 - protein, 8 aa, HUMAN IMMUNODEFICIENCY VIRUS
PTSILDIR

SEQ ID NO: 8932 - protein, 8 aa, HUMAN IMMUNODEFICIENCY VIRUS
LTSLRSLF

SEQ ID NO: 8933 - protein, 9 aa, HUMAN IMMUNODEFICIENCY VIRUS
GSEELRSLY

SEQ ID NO: 8934 - protein, 9 aa, HUMAN IMMUNODEFICIENCY VIRUS
ATLYCVHQK

SEQ ID NO: 8935 - protein, 9 aa, HUMAN IMMUNODEFICIENCY VIRUS
KDTKEALEK

SEQ ID NO: 8936 - protein, 9 aa, HUMAN IMMUNODEFICIENCY VIRUS
MMLNIVGGH

SEQ ID NO: 8937 - protein, 9 aa, HUMAN IMMUNODEFICIENCY VIRUS
NIVGGHQAA

SEQ ID NO: 8938 - protein, 9 aa, HUMAN IMMUNODEFICIENCY VIRUS
TSTLQEQIA

SEQ ID NO: 8939 - protein, 9 aa, HUMAN IMMUNODEFICIENCY VIRUS
PLTSLKSLF

SEQ ID NO: 8940 - protein, 9 aa, HUMAN IMMUNODEFICIENCY VIRUS
PLTSLRSLF

SEQ ID NO: 8941 - protein, 10 aa, HUMAN IMMUNODEFICIENCY VIRUS
TGSEELRSLY

SEQ ID NO: 8942 - protein, 10 aa, HUMAN IMMUNODEFICIENCY VIRUS
VATLYCVHQK

SEQ ID NO: 8943 - protein, 10 aa, HUMAN IMMUNODEFICIENCY VIRUS
NAQGQMVHQA

SEQ ID NO: 8944 - protein, 10 aa, HUMAN IMMUNODEFICIENCY VIRUS
NMMLNIVGGH

SEQ ID NO: 8945 - protein, 10 aa, HUMAN IMMUNODEFICIENCY VIRUS
MLNIVGGHQA

SEQ ID NO: 8946 - protein, 10 aa, HUMAN IMMUNODEFICIENCY VIRUS
YSPTSILDIR

SEQ ID NO: 8947 - protein, 10 aa, HUMAN IMMUNODEFICIENCY VIRUS
RAEQASQEVK

SEQ ID NO: 8948 - protein, 11 aa, HUMAN IMMUNODEFICIENCY VIRUS
RLRPGGKKKYK

SEQ ID NO: 8949 - protein, 11 aa, HUMAN IMMUNODEFICIENCY VIRUS
TVATLYCVHQK

SEQ ID NO: 8950 - protein, 11 aa, HUMAN IMMUNODEFICIENCY VIRUS
MMLNIVGGHQA

SEQ ID NO: 8951 - protein, 11 aa, HUMAN IMMUNODEFICIENCY VIRUS
MLNIVGGHQAA

SEQ ID NO: 8952 - protein, 11 aa, HUMAN IMMUNODEFICIENCY VIRUS
TSILDIRQGPK

SEQ ID NO: 8953 - protein, 9 aa, HUMAN IMMUNODEFICIENCY VIRUS
TIMMQRGNF

SEQ ID NO: 8954 - protein, 8 aa, HUMAN IMMUNODEFICIENCY VIRUS
PGNFLQNR

SEQ ID NO: 8955 - protein, 9 aa, HUMAN IMMUNODEFICIENCY VIRUS
IARNCRAPR

SEQ ID NO: 8956 - protein, 9 aa, HUMAN IMMUNODEFICIENCY VIRUS
KIWPSNKGR

SEQ ID NO: 8957 - protein, 10 aa, HUMAN IMMUNODEFICIENCY VIRUS
NCGKEGHIAR

SEQ ID NO: 8958 - protein, 10 aa, HUMAN IMMUNODEFICIENCY VIRUS
IARNCRAPRK

SEQ ID NO: 8959 - protein, 11 aa, HUMAN IMMUNODEFICIENCY VIRUS
IARNCRAPRKK

SEQ ID NO: 8960 - protein, 11 aa, HUMAN IMMUNODEFICIENCY VIRUS
NFLGKIWPSNK

SEQ ID NO: 8961 - protein, 11 aa, HUMAN IMMUNODEFICIENCY VIRUS
KGRPGNFLQNR

SEQ ID NO: 8962 - protein, 8 aa, HUMAN IMMUNODEFICIENCY VIRUS
KLKHIVWA

SEQ ID NO: 8963 - protein, 8 aa, HUMAN IMMUNODEFICIENCY VIRUS
RIEVKDTK

SEQ ID NO: 8964 - protein, 8 aa, HUMAN IMMUNODEFICIENCY VIRUS
HIARNCRA

SEQ ID NO: 8965 - protein, 8 aa, HUMAN IMMUNODEFICIENCY VIRUS
LTSLKSLF

SEQ ID NO: 8966 - protein, 9 aa, HUMAN IMMUNODEFICIENCY VIRUS
IVKCFNCGK

SEQ ID NO: 8967 - protein, 9 aa, HUMAN IMMUNODEFICIENCY VIRUS
CGKEGHIAR

SEQ ID NO: 8968 - protein, 9 aa, HUMAN IMMUNODEFICIENCY VIRUS
EGHIARNCR

SEQ ID NO: 8969 - protein, 9 aa, HUMAN IMMUNODEFICIENCY VIRUS
LGKIWPSNK

SEQ ID NO: 8970 - protein, 10 aa, HUMAN IMMUNODEFICIENCY VIRUS
KLKHIVWASR

SEQ ID NO: 8971 - protein, 10 aa, HUMAN IMMUNODEFICIENCY VIRUS
RIEVKDTKEA

SEQ ID NO: 8972 - protein, 10 aa, HUMAN IMMUNODEFICIENCY VIRUS
TILRALGPGA

SEQ ID NO: 8973 - protein, 10 aa, HUMAN IMMUNODEFICIENCY VIRUS
EGHIARNCRA

SEQ ID NO: 8974 - protein, 10 aa, HUMAN IMMUNODEFICIENCY VIRUS
HIARNCRAPR

SEQ ID NO: 8975 - protein, 10 aa, HUMAN IMMUNODEFICIENCY VIRUS
FLGKIWPSNK

SEQ ID NO: 8976 - protein, 11 aa, HUMAN IMMUNODEFICIENCY VIRUS
EVKDTKEALDK

SEQ ID NO: 8977 - protein, 11 aa, HUMAN IMMUNODEFICIENCY VIRUS
FSPEVIPMFTA

SEQ ID NO: 8978 - protein, 11 aa, HUMAN IMMUNODEFICIENCY VIRUS
AAEWDRVHPVH

SEQ ID NO: 8979 - protein, 11 aa, HUMAN IMMUNODEFICIENCY VIRUS
KTILRALGPGA

SEQ ID NO: 8980 - protein, 11 aa, HUMAN IMMUNODEFICIENCY VIRUS
HIARNCRAPRK

SEQ ID NO: 8981 - protein, 11 aa, HUMAN IMMUNODEFICIENCY VIRUS
LGKIWPSNKGR

SEQ ID NO: 8982 - protein, 9 aa, HUMAN IMMUNODEFICIENCY VIRUS
NSSQVSQNY

SEQ ID NO: 8983 - protein, 9 aa, HUMAN IMMUNODEFICIENCY VIRUS
KSKKKAQQA

SEQ ID NO: 8984 - protein, 10 aa, HUMAN IMMUNODEFICIENCY VIRUS
NCGKEGHIAK

SEQ ID NO: 8985 - protein, 11 aa, HUMAN IMMUNODEFICIENCY VIRUS
IAKNCRAPRKK

SEQ ID NO: 8986 - protein, 8 aa, HUMAN IMMUNODEFICIENCY VIRUS
EVIPMFTA

SEQ ID NO: 8987 - protein, 9 aa, HUMAN IMMUNODEFICIENCY VIRUS
RGNFRNQRK

SEQ ID NO: 8988 - protein, 9 aa, HUMAN IMMUNODEFICIENCY VIRUS
CGKEGHIAK

SEQ ID NO: 8989 - protein, 9 aa, HUMAN IMMUNODEFICIENCY VIRUS
EGHIAKNCR

SEQ ID NO: 8990 - protein, 10 aa, HUMAN IMMUNODEFICIENCY VIRUS
EGHIAKNCRA

SEQ ID NO: 8991 - protein, 10 aa, HUMAN IMMUNODEFICIENCY VIRUS
PSNKGRPGNF

SEQ ID NO: 8992 - protein, 10 aa, HUMAN IMMUNODEFICIENCY VIRUS
TAPPEESFRF

SEQ ID NO: 8993 - protein, 11 aa, HUMAN IMMUNODEFICIENCY VIRUS
TVATLYCVHQR

SEQ ID NO: 8994 - protein, 11 aa, HUMAN IMMUNODEFICIENCY VIRUS
IVQNAQGQMVH

SEQ ID NO: 8995 - protein, 11 aa, HUMAN IMMUNODEFICIENCY VIRUS
PTAPPEESFRF

SEQ ID NO: 8996 - protein, 8 aa, HUMAN IMMUNODEFICIENCY VIRUS
SSQVSQNY

SEQ ID NO: 8997 - protein, 11 aa, HUMAN IMMUNODEFICIENCY VIRUS
VSQNYPIVQNA

SEQ ID NO: 8998 - protein, 11 aa, HUMAN IMMUNODEFICIENCY VIRUS
RSLYNTVATLY

SEQ ID NO: 8999 - protein, 8 aa, HUMAN IMMUNODEFICIENCY VIRUS
TLYCVHQR

SEQ ID NO: 9000 - protein, 8 aa, HUMAN IMMUNODEFICIENCY VIRUS
FTALSEGA

SEQ ID NO: 9001 - protein, 8 aa, HUMAN IMMUNODEFICIENCY VIRUS
AAEWDRVH

SEQ ID NO: 9002 - protein, 8 aa, HUMAN IMMUNODEFICIENCY VIRUS
WDRVHPVH

SEQ ID NO: 9003 - protein, 8 aa, HUMAN IMMUNODEFICIENCY VIRUS
RGNFRNQR

SEQ ID NO: 9004 - protein, 8 aa, HUMAN IMMUNODEFICIENCY VIRUS
TAPPEESF

SEQ ID NO: 9005 - protein, 8 aa, HUMAN IMMUNODEFICIENCY VIRUS
LASLKSLF

SEQ ID NO: 9006 - protein, 9 aa, HUMAN IMMUNODEFICIENCY VIRUS
VLSGGKLDA

SEQ ID NO: 9007 - protein, 9 aa, HUMAN IMMUNODEFICIENCY VIRUS
LFNTVATLY

SEQ ID NO: 9008 - protein, 9 aa, HUMAN IMMUNODEFICIENCY VIRUS
ATLYCVHQR

SEQ ID NO: 9009 - protein, 9 aa, HUMAN IMMUNODEFICIENCY VIRUS
MFTALSEGA

SEQ ID NO: 9010 - protein, 9 aa, HUMAN IMMUNODEFICIENCY VIRUS
EAAEWDRVH

SEQ ID NO: 9011 - protein, 9 aa, HUMAN IMMUNODEFICIENCY VIRUS
WDRVHPVHA

SEQ ID NO: 9012 - protein, 9 aa, HUMAN IMMUNODEFICIENCY VIRUS
PTAPPEESF

SEQ ID NO: 9013 - protein, 9 aa, HUMAN IMMUNODEFICIENCY VIRUS
TAPPEESFR

SEQ ID NO: 9014 - protein, 9 aa, HUMAN IMMUNODEFICIENCY VIRUS
PLASLKSLF

SEQ ID NO: 9015 - protein, 10 aa, HUMAN IMMUNODEFICIENCY VIRUS
SVLSGGKLDA

SEQ ID NO: 9016 - protein, 10 aa, HUMAN IMMUNODEFICIENCY VIRUS
SGGKLDAWEK

SEQ ID NO: 9017 - protein, 10 aa, HUMAN IMMUNODEFICIENCY VIRUS
ELRSLYNTVA

SEQ ID NO: 9018 - protein, 10 aa, HUMAN IMMUNODEFICIENCY VIRUS
SLFNTVATLY

SEQ ID NO: 9019 - protein, 10 aa, HUMAN IMMUNODEFICIENCY VIRUS
VATLYCVHQR

SEQ ID NO: 9020 - protein, 10 aa, HUMAN IMMUNODEFICIENCY VIRUS
KIEEEQNKSK

SEQ ID NO: 9021 - protein, 10 aa, HUMAN IMMUNODEFICIENCY VIRUS
PMFTALSEGA

SEQ ID NO: 9022 - protein, 10 aa, HUMAN IMMUNODEFICIENCY VIRUS
RAEQATQDVK

SEQ ID NO: 9023 - protein, 10 aa, HUMAN IMMUNODEFICIENCY VIRUS
PTAPPEESFR

SEQ ID NO: 9024 - protein, 11 aa, HUMAN IMMUNODEFICIENCY VIRUS
ASVLSGGKLDA

SEQ ID NO: 9025 - protein, 11 aa, HUMAN IMMUNODEFICIENCY VIRUS
LSGGKLDAWEK

SEQ ID NO: 9026 - protein, 11 aa, HUMAN IMMUNODEFICIENCY VIRUS
PGLLETSEGCR

SEQ ID NO: 9027 - protein, 11 aa, HUMAN IMMUNODEFICIENCY VIRUS
KIEEEQNKSKK

SEQ ID NO: 9028 - protein, 11 aa, HUMAN IMMUNODEFICIENCY VIRUS
RLHPVHAGPIA

SEQ ID NO: 9029 - protein, 11 aa, HUMAN IMMUNODEFICIENCY VIRUS
MMQRGNFRNQR

SEQ ID NO: 9030 - protein, 10 aa, HUMAN IMMUNODEFICIENCY VIRUS
IAKNCRAPRK

SEQ ID NO: 9031 - protein, 8 aa, HUMAN IMMUNODEFICIENCY VIRUS
LSGGKLDA

SEQ ID NO: 9032 - protein, 8 aa, HUMAN IMMUNODEFICIENCY VIRUS
LDAWEKIR

SEQ ID NO: 9033 - protein, 8 aa, HUMAN IMMUNODEFICIENCY VIRUS
NAQGQMVH

SEQ ID NO: 9034 - protein, 8 aa, HUMAN IMMUNODEFICIENCY VIRUS
PVSILDIK

SEQ ID NO: 9035 - protein, 8 aa, HUMAN IMMUNODEFICIENCY VIRUS
ILKALGPA

SEQ ID NO: 9036 - protein, 9 aa, HUMAN IMMUNODEFICIENCY VIRUS
KLDAWEKIR

SEQ ID NO: 9037 - protein, 9 aa, HUMAN IMMUNODEFICIENCY VIRUS
GGKKKYRLK

SEQ ID NO: 9038 - protein, 9 aa, HUMAN IMMUNODEFICIENCY VIRUS
TILKALGPA

SEQ ID NO: 9039 - protein, 9 aa, HUMAN IMMUNODEFICIENCY VIRUS
ILKALGPAA

SEQ ID NO: 9040 - protein, 9 aa, HUMAN IMMUNODEFICIENCY VIRUS
VLAEAMSQA

SEQ ID NO: 9041 - protein, 10 aa, HUMAN IMMUNODEFICIENCY VIRUS
LDAWEKIRLR

SEQ ID NO: 9042 - protein, 10 aa, HUMAN IMMUNODEFICIENCY VIRUS
PGGKKKYRLK

SEQ ID NO: 9043 - protein, 10 aa, HUMAN IMMUNODEFICIENCY VIRUS
GGKKKYRLKH

SEQ ID NO: 9044 - protein, 10 aa, HUMAN IMMUNODEFICIENCY VIRUS
GLLETSEGCR

SEQ ID NO: 9045 - protein, 10 aa, HUMAN IMMUNODEFICIENCY VIRUS
YSPVSILDIK

SEQ ID NO: 9046 - protein, 10 aa, HUMAN IMMUNODEFICIENCY VIRUS
KTILKALGPA

SEQ ID NO: 9047 - protein, 10 aa, HUMAN IMMUNODEFICIENCY VIRUS
TILKALGPAA

SEQ ID NO: 9048 - protein, 10 aa, HUMAN IMMUNODEFICIENCY VIRUS
AATLEEMMTA

SEQ ID NO: 9049 - protein, 10 aa, HUMAN IMMUNODEFICIENCY VIRUS
RVLAEAMSQA

SEQ ID NO: 9050 - protein, 11 aa, HUMAN IMMUNODEFICIENCY VIRUS
GGKLDAWEKIR

SEQ ID NO: 9051 - protein, 11 aa, HUMAN IMMUNODEFICIENCY VIRUS
KLDAWEKIRLR

SEQ ID NO: 9052 - protein, 11 aa, HUMAN IMMUNODEFICIENCY VIRUS
PGGKKKYRLKH

SEQ ID NO: 9053 - protein, 11 aa, HUMAN IMMUNODEFICIENCY VIRUS
VSILDIKQGPK

SEQ ID NO: 9054 - protein, 11 aa, HUMAN IMMUNODEFICIENCY VIRUS
KTILKALGPAA

SEQ ID NO: 9055 - protein, 11 aa, HUMAN IMMUNODEFICIENCY VIRUS
PAATLEEMMTA

SEQ ID NO: 9056 - protein, 11 aa, HUMAN IMMUNODEFICIENCY VIRUS
HIAKNCRAPRK

SEQ ID NO: 9057 - protein, 8 aa, HUMAN IMMUNODEFICIENCY VIRUS
LAEAMSQA

SEQ ID NO: 9058 - protein, 8 aa, HUMAN IMMUNODEFICIENCY VIRUS
RLKHLVWA

SEQ ID NO: 9059 - protein, 8 aa, HUMAN IMMUNODEFICIENCY VIRUS
LSPRTLNA

SEQ ID NO: 9060 - protein, 8 aa, HUMAN IMMUNODEFICIENCY VIRUS
PIPPGQMR

SEQ ID NO: 9061 - protein, 9 aa, HUMAN IMMUNODEFICIENCY VIRUS
GGKLDAWEK

SEQ ID NO: 9062 - protein, 9 aa, HUMAN IMMUNODEFICIENCY VIRUS
DAWEKIRLR

SEQ ID NO: 9063 - protein, 9 aa, HUMAN IMMUNODEFICIENCY VIRUS
LLETSEGCR

SEQ ID NO: 9064 - protein, 10 aa, HUMAN IMMUNODEFICIENCY VIRUS
RLKHLVWASR

SEQ ID NO: 9065 - protein, 10 aa, HUMAN IMMUNODEFICIENCY VIRUS
LDKIEEEQNK

SEQ ID NO: 9066 - protein, 10 aa, HUMAN IMMUNODEFICIENCY VIRUS
AGPIPPGQMR

SEQ ID NO: 9067 - protein, 11 aa, HUMAN IMMUNODEFICIENCY VIRUS
ALDKIEEEQNK

SEQ ID NO: 9068 - protein, 11 aa, HUMAN IMMUNODEFICIENCY VIRUS
LSPRTLNAWVK

SEQ ID NO: 9069 - protein, 11 aa, HUMAN IMMUNODEFICIENCY VIRUS
HAGPIPPGQMR

SEQ ID NO: 9070 - protein, 11 aa, HUMAN IMMUNODEFICIENCY VIRUS
PIPPGQMREPR

SEQ ID NO: 9071 - protein, 11 aa, HUMAN IMMUNODEFICIENCY VIRUS
PGATLEEMMTA

SEQ ID NO: 9072 - protein, 8 aa, HUMAN IMMUNODEFICIENCY VIRUS
RSLYNTVA

SEQ ID NO: 9073 - protein, 9 aa, HUMAN IMMUNODEFICIENCY VIRUS
IAKNCRAPR

SEQ ID NO: 9074 - protein, 8 aa, HUMAN IMMUNODEFICIENCY VIRUS
LDKWEKIR

SEQ ID NO: 9075 - protein, 8 aa, HUMAN IMMUNODEFICIENCY VIRUS
PVGDIYKR

SEQ ID NO: 9076 - protein, 8 aa, HUMAN IMMUNODEFICIENCY VIRUS
PDCKTILR

SEQ ID NO: 9077 - protein, 8 aa, HUMAN IMMUNODEFICIENCY VIRUS
DCKTILRA

SEQ ID NO: 9078 - protein, 8 aa, HUMAN IMMUNODEFICIENCY VIRUS
HIAKNCRA

SEQ ID NO: 9079 - protein, 9 aa, HUMAN IMMUNODEFICIENCY VIRUS
PDCKTILRA

SEQ ID NO: 9080 - protein, 9 aa, HUMAN IMMUNODEFICIENCY VIRUS
ILRALGPGA

SEQ ID NO: 9081 - protein, 10 aa, HUMAN IMMUNODEFICIENCY VIRUS
LDKWEKIRLR

SEQ ID NO: 9082 - protein, 10 aa, HUMAN IMMUNODEFICIENCY VIRUS
SILDIKQGPK

SEQ ID NO: 9083 - protein, 10 aa, HUMAN IMMUNODEFICIENCY VIRUS
HIAKNCRAPR

SEQ ID NO: 9084 - protein, 11 aa, HUMAN IMMUNODEFICIENCY VIRUS
HAGPIAPGQMR

SEQ ID NO: 9085 - protein, 11 aa, HUMAN IMMUNODEFICIENCY VIRUS
NANPDCKTILR

SEQ ID NO: 9086 - protein, 11 aa, HUMAN IMMUNODEFICIENCY VIRUS
LARNCRAPRKK

SEQ ID NO: 9087 - protein, 8 aa, HUMAN IMMUNODEFICIENCY VIRUS
PVHAGPIA

SEQ ID NO: 9088 - protein, 8 aa, HUMAN IMMUNODEFICIENCY VIRUS
PIAPGQMR

SEQ ID NO: 9089 - protein, 8 aa, HUMAN IMMUNODEFICIENCY VIRUS
LDIKQGPK

SEQ ID NO: 9090 - protein, 9 aa, HUMAN IMMUNODEFICIENCY VIRUS
ILDIKQGPK

SEQ ID NO: 9091 - protein, 9 aa, HUMAN IMMUNODEFICIENCY VIRUS
PSHKARVLA

SEQ ID NO: 9092 - protein, 10 aa, HUMAN IMMUNODEFICIENCY VIRUS
AGPIAPGQMR

SEQ ID NO: 9093 - protein, 10 aa, HUMAN IMMUNODEFICIENCY VIRUS
IAPGQMREPR

SEQ ID NO: 9094 - protein, 10 aa, HUMAN IMMUNODEFICIENCY VIRUS
DIKQGPKEPF

SEQ ID NO: 9095 - protein, 11 aa, HUMAN IMMUNODEFICIENCY VIRUS
RLRPGGKKKYR

SEQ ID NO: 9096 - protein, 11 aa, HUMAN IMMUNODEFICIENCY VIRUS
IVWASRELERF

SEQ ID NO: 9097 - protein, 11 aa, HUMAN IMMUNODEFICIENCY VIRUS
PIAPGQMREPR

SEQ ID NO: 9098 - protein, 11 aa, HUMAN IMMUNODEFICIENCY VIRUS
LDIKQGPKEPF

SEQ ID NO: 9099 - protein, 11 aa, HUMAN IMMUNODEFICIENCY VIRUS
DIKQGPKEPFR

SEQ ID NO: 9100 - protein, 11 aa, HUMAN IMMUNODEFICIENCY VIRUS
GGPSHKARVLA

SEQ ID NO: 9101 - protein, 11 aa, HUMAN IMMUNODEFICIENCY VIRUS
PSHKARVLAEA

SEQ ID NO: 9102 - protein, 9 aa, HUMAN IMMUNODEFICIENCY VIRUS
LARNCRAPR

SEQ ID NO: 9103 - protein, 10 aa, HUMAN IMMUNODEFICIENCY VIRUS
LARNCRAPRK

SEQ ID NO: 9104 - protein, 8 aa, HUMAN IMMUNODEFICIENCY VIRUS
PGGKKKYR

SEQ ID NO: 9105 - protein, 8 aa, HUMAN IMMUNODEFICIENCY VIRUS
TAPPAESF

SEQ ID NO: 9106 - protein, 9 aa, HUMAN IMMUNODEFICIENCY VIRUS
IMMQRGNFR

SEQ ID NO: 9107 - protein, 9 aa, HUMAN IMMUNODEFICIENCY VIRUS
PTAPPAESF

SEQ ID NO: 9108 - protein, 10 aa, HUMAN IMMUNODEFICIENCY VIRUS
IVWASRELER

SEQ ID NO: 9109 - protein, 10 aa, HUMAN IMMUNODEFICIENCY VIRUS
HLARNCRAPR

SEQ ID NO: 9110 - protein, 11 aa, HUMAN IMMUNODEFICIENCY VIRUS
HIVWASRELER

SEQ ID NO: 9111 - protein, 11 aa, HUMAN IMMUNODEFICIENCY VIRUS
HLARNCRAPRK

SEQ ID NO: 9112 - protein, 8 aa, HUMAN IMMUNODEFICIENCY VIRUS
HLARNCRA

SEQ ID NO: 9113 - protein, 9 aa, HUMAN IMMUNODEFICIENCY VIRUS
EGHLARNCR

SEQ ID NO: 9114 - protein, 10 aa, HUMAN IMMUNODEFICIENCY VIRUS
NLQGQMVHQA

SEQ ID NO: 9115 - protein, 10 aa, HUMAN IMMUNODEFICIENCY VIRUS
EGHLARNCRA

SEQ ID NO: 9116 - protein, 11 aa, HUMAN IMMUNODEFICIENCY VIRUS
QSRPEPTAPPA

SEQ ID NO: 9117 - protein, 9 aa, HUMAN IMMUNODEFICIENCY VIRUS
KIWPSHKGR

SEQ ID NO: 9118 - protein, 8 aa, HUMAN IMMUNODEFICIENCY VIRUS
EVKDTKEA

SEQ ID NO: 9119 - protein, 8 aa, HUMAN IMMUNODEFICIENCY VIRUS
ETINEEAA

SEQ ID NO: 9120 - protein, 8 aa, HUMAN IMMUNODEFICIENCY VIRUS
DTLLVQNA

SEQ ID NO: 9121 - protein, 8 aa, HUMAN IMMUNODEFICIENCY VIRUS
GGPSHKAR

SEQ ID NO: 9122 - protein, 9 aa, HUMAN IMMUNODEFICIENCY VIRUS
TDTLLVQNA

SEQ ID NO: 9123 - protein, 9 aa, HUMAN IMMUNODEFICIENCY VIRUS
VGGPSHKAR

SEQ ID NO: 9124 - protein, 10 aa, HUMAN IMMUNODEFICIENCY VIRUS
SLYNTVATLY

SEQ ID NO: 9125 - protein, 10 aa, HUMAN IMMUNODEFICIENCY VIRUS
MLKETINEEA

SEQ ID NO: 9126 - protein, 10 aa, HUMAN IMMUNODEFICIENCY VIRUS
MTDTLLVQNA

SEQ ID NO: 9127 - protein, 10 aa, HUMAN IMMUNODEFICIENCY VIRUS
GVGGPSHKAR

SEQ ID NO: 9128 - protein, 11 aa, HUMAN IMMUNODEFICIENCY VIRUS
QMLKETINEEA

SEQ ID NO: 9129 - protein, 11 aa, HUMAN IMMUNODEFICIENCY VIRUS
MLKETINEEAA

SEQ ID NO: 9130 - protein, 11 aa, HUMAN IMMUNODEFICIENCY VIRUS
WMTDTLLVQNA

SEQ ID NO: 9131 - protein, 11 aa, HUMAN IMMUNODEFICIENCY VIRUS
QGVGGPSHKAR

SEQ ID NO: 9132 - protein, 11 aa, HUMAN IMMUNODEFICIENCY VIRUS
LGKIWPSHKGR

SEQ ID NO: 9133 - protein, 11 aa, HUMAN IMMUNODEFICIENCY VIRUS
NFLGKIWPSHK

SEQ ID NO: 9134 - protein, 8 aa, HUMAN IMMUNODEFICIENCY VIRUS
KIEEEQNK

SEQ ID NO: 9135 - protein, 8 aa, HUMAN IMMUNODEFICIENCY VIRUS
QGVGGPSH

SEQ ID NO: 9136 - protein, 8 aa, HUMAN IMMUNODEFICIENCY VIRUS
GVGGPSHK

SEQ ID NO: 9137 - protein, 8 aa, HUMAN IMMUNODEFICIENCY VIRUS
VGGPSHKA

SEQ ID NO: 9138 - protein, 8 aa, HUMAN IMMUNODEFICIENCY VIRUS
MMQRGNFR

SEQ ID NO: 9139 - protein, 9 aa, HUMAN IMMUNODEFICIENCY VIRUS
QGVGGPSHK

SEQ ID NO: 9140 - protein, 9 aa, HUMAN IMMUNODEFICIENCY VIRUS
GVGGPSHKA

SEQ ID NO: 9141 - protein, 9 aa, HUMAN IMMUNODEFICIENCY VIRUS
LGKIWPSHK

SEQ ID NO: 9142 - protein, 10 aa, HUMAN IMMUNODEFICIENCY VIRUS
ACQGVGGPSH

SEQ ID NO: 9143 - protein, 10 aa, HUMAN IMMUNODEFICIENCY VIRUS
QGVGGPSHKA

SEQ ID NO: 9144 - protein, 10 aa, HUMAN IMMUNODEFICIENCY VIRUS
FLGKIWPSHK

SEQ ID NO: 9145 - protein, 10 aa, HUMAN IMMUNODEFICIENCY VIRUS
PSHKGRPGNF

SEQ ID NO: 9146 - protein, 11 aa, HUMAN IMMUNODEFICIENCY VIRUS
TACQGVGGPSH

SEQ ID NO: 9147 - protein, 11 aa, HUMAN IMMUNODEFICIENCY VIRUS
ACQGVGGPSHK

SEQ ID NO: 9148 - protein, 10 aa, HUMAN IMMUNODEFICIENCY VIRUS
NCGKEGHLAR

SEQ ID NO: 9149 - protein, 8 aa, HUMAN IMMUNODEFICIENCY VIRUS
KVIEEKAF

SEQ ID NO: 9150 - protein, 9 aa, HUMAN IMMUNODEFICIENCY VIRUS
CGKEGHLAR

SEQ ID NO: 9151 - protein, 10 aa, HUMAN IMMUNODEFICIENCY VIRUS
WVKVIEEKAF

SEQ ID NO: 9152 - protein, 10 aa, HUMAN IMMUNODEFICIENCY VIRUS
YSPVSILDIR

SEQ ID NO: 9153 - protein, 10 aa, HUMAN IMMUNODEFICIENCY VIRUS
NFLGKIWPSH

SEQ ID NO: 9154 - protein, 8 aa, HUMAN IMMUNODEFICIENCY VIRUS
PVSILDIR

SEQ ID NO: 9155 - protein, 8 aa, HUMAN IMMUNODEFICIENCY VIRUS
LGKIWPSH

SEQ ID NO: 9156 - protein, 9 aa, HUMAN IMMUNODEFICIENCY VIRUS
KDTKEALDK

SEQ ID NO: 9157 - protein, 9 aa, HUMAN IMMUNODEFICIENCY VIRUS
WVKVIEEKA

SEQ ID NO: 9158 - protein, 9 aa, HUMAN IMMUNODEFICIENCY VIRUS
FLGKIWPSH

SEQ ID NO: 9159 - protein, 11 aa, HUMAN IMMUNODEFICIENCY VIRUS
LVWASRELERF

SEQ ID NO: 9160 - protein, 11 aa, HUMAN IMMUNODEFICIENCY VIRUS
NAWVKVIEEKA

SEQ ID NO: 9161 - protein, 11 aa, HUMAN IMMUNODEFICIENCY VIRUS
VSILDIRQGPK

SEQ ID NO: 9162 - protein, 10 aa, HUMAN IMMUNODEFICIENCY VIRUS
LVWASRELER

SEQ ID NO: 9163 - protein, 11 aa, HUMAN IMMUNODEFICIENCY VIRUS
HLVWASRELER

SEQ ID NO: 9164 - protein, 11 aa, HUMAN IMMUNODEFICIENCY VIRUS
CFNCGKEGHIA

SEQ ID NO: 9165 - protein, 9 aa, HUMAN IMMUNODEFICIENCY VIRUS
NCGKEGHIA

SEQ ID NO: 9166 - protein, 9 aa, HUMAN IMMUNODEFICIENCY VIRUS
NCGKEGHLA

SEQ ID NO: 9167 - protein, 8 aa, HUMAN IMMUNODEFICIENCY VIRUS
RFFKTLRA

SEQ ID NO: 9168 - protein, 8 aa, HUMAN IMMUNODEFICIENCY VIRUS
IMMQRGNF

SEQ ID NO: 9169 - protein, 8 aa, HUMAN IMMUNODEFICIENCY VIRUS
CGKEGHIA

SEQ ID NO: 9170 - protein, 8 aa, HUMAN IMMUNODEFICIENCY VIRUS
CGKEGHLA

SEQ ID NO: 9171 - protein, 9 aa, HUMAN IMMUNODEFICIENCY VIRUS
MVHQAISPR

SEQ ID NO: 9172 - protein, 9 aa, HUMAN IMMUNODEFICIENCY VIRUS
VDRFFKTLR

SEQ ID NO: 9173 - protein, 10 aa, HUMAN IMMUNODEFICIENCY VIRUS
QMVHQAISPR

SEQ ID NO: 9174 - protein, 10 aa, HUMAN IMMUNODEFICIENCY VIRUS
YVDRFFKTLR

SEQ ID NO: 9175 - protein, 10 aa, HUMAN IMMUNODEFICIENCY VIRUS
VDRFFKTLRA

SEQ ID NO: 9176 - protein, 10 aa, HUMAN IMMUNODEFICIENCY VIRUS
FFKTLRAEQA

SEQ ID NO: 9177 - protein, 10 aa, HUMAN IMMUNODEFICIENCY VIRUS
RAEQATQEVK

SEQ ID NO: 9178 - protein, 11 aa, HUMAN IMMUNODEFICIENCY VIRUS
NAWVKVVEEKA

SEQ ID NO: 9179 - protein, 11 aa, HUMAN IMMUNODEFICIENCY VIRUS
YVDRFFKTLRA

SEQ ID NO: 9180 - protein, 11 aa, HUMAN IMMUNODEFICIENCY VIRUS
RFFKTLRAEQA

SEQ ID NO: 9181 - protein, 11 aa, HUMAN IMMUNODEFICIENCY VIRUS
RFYKTLRAEQA

SEQ ID NO: 9182 - protein, 11 aa, HUMAN IMMUNODEFICIENCY VIRUS
NANPDCKTILK

SEQ ID NO: 9183 - protein, 11 aa, HUMAN IMMUNODEFICIENCY VIRUS
CFNCGKEGHLA

SEQ ID NO: 9184 - protein, 11 aa, HUMAN IMMUNODEFICIENCY VIRUS
KGRPGNFLQSR

SEQ ID NO: 9185 - protein, 11 aa, HUMAN IMMUNODEFICIENCY VIRUS
NFLQSRPEPTA

SEQ ID NO: 9186 - protein, 8 aa, HUMAN IMMUNODEFICIENCY VIRUS
KVVEEKAF

SEQ ID NO: 9187 - protein, 8 aa, HUMAN IMMUNODEFICIENCY VIRUS
RFYKTLRA

SEQ ID NO: 9188 - protein, 8 aa, HUMAN IMMUNODEFICIENCY VIRUS
PDCKTILK

SEQ ID NO: 9189 - protein, 8 aa, HUMAN IMMUNODEFICIENCY VIRUS
DCKTILKA

SEQ ID NO: 9190 - protein, 9 aa, HUMAN IMMUNODEFICIENCY VIRUS
WVKVVEEKA

SEQ ID NO: 9191 - protein, 9 aa, HUMAN IMMUNODEFICIENCY VIRUS
VDRFYKTLR

SEQ ID NO: 9192 - protein, 9 aa, HUMAN IMMUNODEFICIENCY VIRUS
PDCKTILKA

SEQ ID NO: 9193 - protein, 10 aa, HUMAN IMMUNODEFICIENCY VIRUS
WVKVVEEKAF

SEQ ID NO: 9194 - protein, 10 aa, HUMAN IMMUNODEFICIENCY VIRUS
PFRDYVDRFY

SEQ ID NO: 9195 - protein, 10 aa, HUMAN IMMUNODEFICIENCY VIRUS
YVDRFYKTLR

SEQ ID NO: 9196 - protein, 10 aa, HUMAN IMMUNODEFICIENCY VIRUS
VDRFYKTLRA

SEQ ID NO: 9197 - protein, 10 aa, HUMAN IMMUNODEFICIENCY VIRUS
GATLEEMMTA

SEQ ID NO: 9198 - protein, 10 aa, HUMAN IMMUNODEFICIENCY VIRUS
FLQSRPEPTA

SEQ ID NO: 9199 - protein, 11 aa, HUMAN IMMUNODEFICIENCY VIRUS
PFRDYVDRFYK

SEQ ID NO: 9200 - protein, 11 aa, HUMAN IMMUNODEFICIENCY VIRUS
YVDRFYKTLRA

SEQ ID NO: 9201 - protein, 11 aa, HUMAN IMMUNODEFICIENCY VIRUS
GARASVLSGGK

SEQ ID NO: 9202 - protein, 8 aa, HUMAN IMMUNODEFICIENCY VIRUS
ASVLSGGK

SEQ ID NO: 9203 - protein, 8 aa, HUMAN IMMUNODEFICIENCY VIRUS
NLQGQMVH

SEQ ID NO: 9204 - protein, 8 aa, HUMAN IMMUNODEFICIENCY VIRUS
WVKVIEEK

SEQ ID NO: 9205 - protein, 8 aa, HUMAN IMMUNODEFICIENCY VIRUS
WDRLHPVH

SEQ ID NO: 9206 - protein, 8 aa, HUMAN IMMUNODEFICIENCY VIRUS
RDYVDRFY

SEQ ID NO: 9207 - protein, 9 aa, HUMAN IMMUNODEFICIENCY VIRUS
RASVLSGGK

SEQ ID NO: 9208 - protein, 9 aa, HUMAN IMMUNODEFICIENCY VIRUS
AISPRTLNA

SEQ ID NO: 9209 - protein, 9 aa, HUMAN IMMUNODEFICIENCY VIRUS
WDRLHPVHA

SEQ ID NO: 9210 - protein, 9 aa, HUMAN IMMUNODEFICIENCY VIRUS
RDYVDRFYK

SEQ ID NO: 9211 - protein, 10 aa, HUMAN IMMUNODEFICIENCY VIRUS
QAISPRTLNA

SEQ ID NO: 9212 - protein, 10 aa, HUMAN IMMUNODEFICIENCY VIRUS
NAWVKVIEEK

SEQ ID NO: 9213 - protein, 11 aa, HUMAN IMMUNODEFICIENCY VIRUS
IVQNLQGQMVH

SEQ ID NO: 9214 - protein, 11 aa, HUMAN IMMUNODEFICIENCY VIRUS
AAEWDRLHPVH

SEQ ID NO: 9215 - protein, 8 aa, HUMAN IMMUNODEFICIENCY VIRUS
PGNFLQSR

SEQ ID NO: 9216 - protein, 10 aa, HUMAN IMMUNODEFICIENCY VIRUS
NAWVKVVEEK

SEQ ID NO: 9217 - protein, 11 aa, HUMAN IMMUNODEFICIENCY VIRUS
KIRLRPGGKKK

SEQ ID NO: 9218 - protein, 8 aa, HUMAN IMMUNODEFICIENCY VIRUS
WVKVVEEK

SEQ ID NO: 9219 - protein, 10 aa, HUMAN IMMUNODEFICIENCY VIRUS
MLKDTINEEA

SEQ ID NO: 9220 - protein, 11 aa, HUMAN IMMUNODEFICIENCY VIRUS
QMLKDTINEEA

SEQ ID NO: 9221 - protein, 11 aa, HUMAN IMMUNODEFICIENCY VIRUS
MLKDTINEEAA

SEQ ID NO: 9222 - protein, 8 aa, HUMAN IMMUNODEFICIENCY VIRUS
KDTINEEA

SEQ ID NO: 9223 - protein, 8 aa, HUMAN IMMUNODEFICIENCY VIRUS
DTINEEAA

SEQ ID NO: 9224 - protein, 9 aa, HUMAN IMMUNODEFICIENCY VIRUS
KDTINEEAA

SEQ ID NO: 9225 - protein, 9 aa, HUMAN IMMUNODEFICIENCY VIRUS
RDYVDRFFK

SEQ ID NO: 9226 - protein, 11 aa, HUMAN IMMUNODEFICIENCY VIRUS
PFRDYVDRFFK

SEQ ID NO: 9227 - protein, 9 aa, HUMAN IMMUNODEFICIENCY VIRUS
RLRPGGKKK

SEQ ID NO: 9228 - protein, 10 aa, HUMAN IMMUNODEFICIENCY VIRUS
RLRPGGKKKY

SEQ ID NO: 9229 - protein, 10 aa, HUMAN IMMUNODEFICIENCY VIRUS
PIPVGEIYKR

SEQ ID NO: 9230 - protein, 8 aa, HUMAN IMMUNODEFICIENCY VIRUS
PIPVGEIY

SEQ ID NO: 9231 - protein, 8 aa, HUMAN IMMUNODEFICIENCY VIRUS
RDYVDRFF

SEQ ID NO: 9232 - protein, 9 aa, HUMAN IMMUNODEFICIENCY VIRUS
PIPVGEIYK

SEQ ID NO: 9233 - protein, 9 aa, HUMAN IMMUNODEFICIENCY VIRUS
PGHKARVLA

SEQ ID NO: 9234 - protein, 10 aa, HUMAN IMMUNODEFICIENCY VIRUS
PFRDYVDRFF

SEQ ID NO: 9235 - protein, 11 aa, HUMAN IMMUNODEFICIENCY VIRUS
WMTETLLVQNA

SEQ ID NO: 9236 - protein, 11 aa, HUMAN IMMUNODEFICIENCY VIRUS
GGPGHKARVLA

SEQ ID NO: 9237 - protein, 11 aa, HUMAN IMMUNODEFICIENCY VIRUS
PGHKARVLAEA

SEQ ID NO: 9238 - protein, 8 aa, HUMAN IMMUNODEFICIENCY VIRUS
DTKEALDK

SEQ ID NO: 9239 - protein, 8 aa, HUMAN IMMUNODEFICIENCY VIRUS
ISPRTLNA

SEQ ID NO: 9240 - protein, 8 aa, HUMAN IMMUNODEFICIENCY VIRUS
QGVGGPGH

SEQ ID NO: 9241 - protein, 8 aa, HUMAN IMMUNODEFICIENCY VIRUS
QSRPEPTA

SEQ ID NO: 9242 - protein, 9 aa, HUMAN IMMUNODEFICIENCY VIRUS
QGVGGPGHK

SEQ ID NO: 9243 - protein, 10 aa, HUMAN IMMUNODEFICIENCY VIRUS
MTETLLVQNA

SEQ ID NO: 9244 - protein, 10 aa, HUMAN IMMUNODEFICIENCY VIRUS
ACQGVGGPGH

SEQ ID NO: 9245 - protein, 10 aa, HUMAN IMMUNODEFICIENCY VIRUS
QGVGGPGHKA

SEQ ID NO: 9246 - protein, 11 aa, HUMAN IMMUNODEFICIENCY VIRUS
ISPRTLNAWVK

SEQ ID NO: 9247 - protein, 11 aa, HUMAN IMMUNODEFICIENCY VIRUS
TACQGVGGPGH

SEQ ID NO: 9248 - protein, 11 aa, HUMAN IMMUNODEFICIENCY VIRUS
ACQGVGGPGHK

SEQ ID NO: 9249 - protein, 11 aa, HUMAN IMMUNODEFICIENCY VIRUS
QGVGGPGHKAR

SEQ ID NO: 9250 - protein, 8 aa, HUMAN IMMUNODEFICIENCY VIRUS
QGQMVHQA

SEQ ID NO: 9251 - protein, 8 aa, HUMAN IMMUNODEFICIENCY VIRUS
ETLLVQNA

SEQ ID NO: 9252 - protein, 8 aa, HUMAN IMMUNODEFICIENCY VIRUS
GVGGPGHK

SEQ ID NO: 9253 - protein, 8 aa, HUMAN IMMUNODEFICIENCY VIRUS
VGGPGHKA

SEQ ID NO: 9254 - protein, 8 aa, HUMAN IMMUNODEFICIENCY VIRUS
GGPGHKAR

SEQ ID NO: 9255 - protein, 9 aa, HUMAN IMMUNODEFICIENCY VIRUS
GVGGPGHKA

SEQ ID NO: 9256 - protein, 9 aa, HUMAN IMMUNODEFICIENCY VIRUS
VGGPGHKAR

SEQ ID NO: 9257 - protein, 10 aa, HUMAN IMMUNODEFICIENCY VIRUS
GVGGPGHKAR

SEQ ID NO: 9258 - protein, 8 aa, HUMAN IMMUNODEFICIENCY VIRUS
AAEWDRLH

SEQ ID NO: 9259 - protein, 9 aa, HUMAN IMMUNODEFICIENCY VIRUS
EAAEWDRLH

SEQ ID NO: 9260 - protein, 8 aa, HUMAN IMMUNODEFICIENCY VIRUS
PVGEIYKR

SEQ ID NO: 9261 - protein, 9 aa, HUMAN IMMUNODEFICIENCY VIRUS
TVATLYCVH

SEQ ID NO: 9262 - protein, 10 aa, HUMAN IMMUNODEFICIENCY VIRUS
NTVATLYCVH

SEQ ID NO: 9263 - protein, 10 aa, HUMAN IMMUNODEFICIENCY VIRUS
SILDIRQGPK

SEQ ID NO: 9264 - protein, 11 aa, HUMAN IMMUNODEFICIENCY VIRUS
FSPEVIPMFSA

SEQ ID NO: 9265 - protein, 10 aa, HUMAN IMMUNODEFICIENCY VIRUS
DIRQGPKEPF

SEQ ID NO: 9266 - protein, 11 aa, HUMAN IMMUNODEFICIENCY VIRUS
LDIRQGPKEPF

SEQ ID NO: 9267 - protein, 11 aa, HUMAN IMMUNODEFICIENCY VIRUS
DIRQGPKEPFR

SEQ ID NO: 9268 - protein, 8 aa, HUMAN IMMUNODEFICIENCY VIRUS
VATLYCVH

SEQ ID NO: 9269 - protein, 8 aa, HUMAN IMMUNODEFICIENCY VIRUS
LDIRQGPK

SEQ ID NO: 9270 - protein, 9 aa, HUMAN IMMUNODEFICIENCY VIRUS
ILDIRQGPK

SEQ ID NO: 9271 - protein, 10 aa, HUMAN IMMUNODEFICIENCY VIRUS
NTMLNTVGGH

SEQ ID NO: 9272 - protein, 9 aa, HUMAN IMMUNODEFICIENCY VIRUS
TMLNTVGGH

SEQ ID NO: 9273 - protein, 11 aa, HUMAN IMMUNODEFICIENCY VIRUS
TMLNTVGGHQA

SEQ ID NO: 9274 - protein, 8 aa, HUMAN IMMUNODEFICIENCY VIRUS
KGCWKCGK

SEQ ID NO: 9275 - protein, 9 aa, HUMAN IMMUNODEFICIENCY VIRUS
KIRLRPGGK

SEQ ID NO: 9276 - protein, 9 aa, HUMAN IMMUNODEFICIENCY VIRUS
ASRELERFA

SEQ ID NO: 9277 - protein, 10 aa, HUMAN IMMUNODEFICIENCY VIRUS
KIRLRPGGKK

SEQ ID NO: 9278 - protein, 10 aa, HUMAN IMMUNODEFICIENCY VIRUS
WASRELERFA

SEQ ID NO: 9279 - protein, 11 aa, HUMAN IMMUNODEFICIENCY VIRUS
QMREPRGSDIA

SEQ ID NO: 9280 - protein, 11 aa, HUMAN IMMUNODEFICIENCY VIRUS
KGCWKCGKEGH

SEQ ID NO: 9281 - protein, 8 aa, HUMAN IMMUNODEFICIENCY VIRUS
FSALSEGA

SEQ ID NO: 9282 - protein, 8 aa, HUMAN IMMUNODEFICIENCY VIRUS
PGQMREPR

SEQ ID NO: 9283 - protein, 9 aa, HUMAN IMMUNODEFICIENCY VIRUS
MFSALSEGA

SEQ ID NO: 9284 - protein, 9 aa, HUMAN IMMUNODEFICIENCY VIRUS
CGKEGHQMK

SEQ ID NO: 9285 - protein, 10 aa, HUMAN IMMUNODEFICIENCY VIRUS
PMFSALSEGA

SEQ ID NO: 9286 - protein, 10 aa, HUMAN IMMUNODEFICIENCY VIRUS
KCGKEGHQMK

SEQ ID NO: 9287 - protein, 8 aa, HUMAN IMMUNODEFICIENCY VIRUS
ASRELERF

SEQ ID NO: 9288 - protein, 8 aa, HUMAN IMMUNODEFICIENCY VIRUS
EVIPMFSA

SEQ ID NO: 9289 - protein, 8 aa, HUMAN IMMUNODEFICIENCY VIRUS
TLEEMMTA

SEQ ID NO: 9290 - protein, 9 aa, HUMAN IMMUNODEFICIENCY VIRUS
WASRELERF

SEQ ID NO: 9291 - protein, 9 aa, HUMAN IMMUNODEFICIENCY VIRUS
ATLEEMMTA

SEQ ID NO: 9292 - protein, 8 aa, HUMAN IMMUNODEFICIENCY VIRUS
MLNTVGGH

SEQ ID NO: 9293 - protein, 8 aa, HUMAN IMMUNODEFICIENCY VIRUS
NTVGGHQA

SEQ ID NO: 9294 - protein, 8 aa, HUMAN IMMUNODEFICIENCY VIRUS
TVGGHQAA

SEQ ID NO: 9295 - protein, 9 aa, HUMAN IMMUNODEFICIENCY VIRUS
NTVGGHQAA

SEQ ID NO: 9296 - protein, 10 aa, HUMAN IMMUNODEFICIENCY VIRUS
MLNTVGGHQA

SEQ ID NO: 9297 - protein, 11 aa, HUMAN IMMUNODEFICIENCY VIRUS
MLNTVGGHQAA

SEQ ID NO: 9298 - protein, 8 aa, HUMAN IMMUNODEFICIENCY VIRUS
WASRELER

SEQ ID NO: 9299 - protein, 10 aa, HUMAN IMMUNODEFICIENCY VIRUS
GCWKCGKEGH

SEQ ID NO: 9300 - protein, 8 aa, HUMAN IMMUNODEFICIENCY VIRUS
RLRPGGKK

SEQ ID NO: 9301 - protein, 8 aa, HUMAN IMMUNODEFICIENCY VIRUS
QMKDCTER

SEQ ID NO: 9302 - protein, 10 aa, HUMAN IMMUNODEFICIENCY VIRUS
QMKDCTERQA

SEQ ID NO: 9303 - protein, 11 aa, HUMAN IMMUNODEFICIENCY VIRUS
EGHQMKDCTER

SEQ ID NO: 9304 - protein, 10 aa, HUMAN IMMUNODEFICIENCY VIRUS
AFSPEVIPMF

SEQ ID NO: 9305 - protein, 11 aa, HUMAN IMMUNODEFICIENCY VIRUS
KAFSPEVIPMF

SEQ ID NO: 9306 - protein, 10 aa, HUMAN IMMUNODEFICIENCY VIRUS
RAPRKKGCWK

SEQ ID NO: 9307 - protein, 8 aa, HUMAN IMMUNODEFICIENCY VIRUS
KDCTERQA

SEQ ID NO: 9308 - protein, 10 aa, HUMAN IMMUNODEFICIENCY VIRUS
KDCTERQANF

SEQ ID NO: 9309 - protein, 11 aa, HUMAN IMMUNODEFICIENCY VIRUS
CTERQANFLGK

SEQ ID NO: 9310 - protein, 9 aa, HUMAN IMMUNODEFICIENCY VIRUS
DCTERQANF

SEQ ID NO: 9311 - protein, 8 aa, HUMAN IMMUNODEFICIENCY VIRUS
NCRAPRKK

SEQ ID NO: 9312 - protein, 11 aa, HUMAN IMMUNODEFICIENCY VIRUS
TINEEAAEWDR

SEQ ID NO: 9313 - protein, 8 aa, HUMAN IMMUNODEFICIENCY VIRUS
KTLRAEQA

SEQ ID NO: 9314 - protein, 9 aa, HUMAN IMMUNODEFICIENCY VIRUS
FSPEVIPMF

SEQ ID NO: 9315 - protein, 8 aa, HUMAN IMMUNODEFICIENCY VIRUS
CTERQANF

SEQ ID NO: 9316 - protein, 8 aa, HUMAN IMMUNODEFICIENCY VIRUS
WIILGLNK

SEQ ID NO: 9317 - protein, 8 aa, HUMAN IMMUNODEFICIENCY VIRUS
KARVLAEA

SEQ ID NO: 9318 - protein, 9 aa, HUMAN IMMUNODEFICIENCY VIRUS
CFNCGKEGH

SEQ ID NO: 9319 - protein, 10 aa, HUMAN IMMUNODEFICIENCY VIRUS
IILGLNKIVR

SEQ ID NO: 9320 - protein, 10 aa, HUMAN IMMUNODEFICIENCY VIRUS
KCFNCGKEGH

SEQ ID NO: 9321 - protein, 11 aa, HUMAN IMMUNODEFICIENCY VIRUS
WIILGLNKIVR

SEQ ID NO: 9322 - protein, 11 aa, HUMAN IMMUNODEFICIENCY VIRUS
ILGLNKIVRMY

SEQ ID NO: 9323 - protein, 9 aa, HUMAN IMMUNODEFICIENCY VIRUS
ILGLNKIVR

SEQ ID NO: 9324 - protein, 10 aa, HUMAN IMMUNODEFICIENCY VIRUS
LGLNKIVRMY

SEQ ID NO: 9325 - protein, 11 aa, HUMAN IMMUNODEFICIENCY VIRUS
LLVQNANPDCK

SEQ ID NO: 9326 - protein, 8 aa, HUMAN IMMUNODEFICIENCY VIRUS
LGLNKIVR

SEQ ID NO: 9327 - protein, 10 aa, HUMAN IMMUNODEFICIENCY VIRUS
LVQNANPDCK

SEQ ID NO: 9328 - protein, 9 aa, HUMAN IMMUNODEFICIENCY VIRUS
GLNKIVRMY

SEQ ID NO: 9329 - protein, 8 aa, HUMAN IMMUNODEFICIENCY VIRUS
QAAMQMLK

SEQ ID NO: 9330 - protein, 11 aa, HUMAN IMMUNODEFICIENCY VIRUS
GGHQAAMQMLK

SEQ ID NO: 9331 - protein, 8 aa, HUMAN IMMUNODEFICIENCY VIRUS
RTLNAWVK

SEQ ID NO: 9332 - protein, 8 aa, HUMAN IMMUNODEFICIENCY VIRUS
QGPKEPFR

SEQ ID NO: 9333 - protein, 8 aa, HUMAN IMMUNODEFICIENCY VIRUS
PFRDYVDR

SEQ ID NO: 9334 - protein, 9 aa, HUMAN IMMUNODEFICIENCY VIRUS
PFRDYVDRF

SEQ ID NO: 9335 - protein, 10 aa, HUMAN IMMUNODEFICIENCY VIRUS
QGPKEPFRDY

SEQ ID NO: 9336 - protein, 11 aa, HUMAN IMMUNODEFICIENCY VIRUS
QAEPAAAGVGA

SEQ ID NO: 9337 - protein, 8 aa, HUMAN IMMUNODEFICIENCY VIRUS
RAQAEPAA

SEQ ID NO: 9338 - protein, 9 aa, HUMAN IMMUNODEFICIENCY VIRUS
RAQAEPAAA

SEQ ID NO: 9339 - protein, 11 aa, HUMAN IMMUNODEFICIENCY VIRUS
QTEPAAVGVGA

SEQ ID NO: 9340 - protein, 11 aa, HUMAN IMMUNODEFICIENCY VIRUS
RAEPAADGVGA

SEQ ID NO: 9341 - protein, 11 aa, HUMAN IMMUNODEFICIENCY VIRUS
RTEPAAVGVGA

SEQ ID NO: 9342 - protein, 11 aa, HUMAN IMMUNODEFICIENCY VIRUS
QAEPAAEGVGA

SEQ ID NO: 9343 - protein, 11 aa, HUMAN IMMUNODEFICIENCY VIRUS
QAPTAAKGVGA

SEQ ID NO: 9344 - protein, 10 aa, HUMAN IMMUNODEFICIENCY VIRUS
AADGVGAVSR

SEQ ID NO: 9345 - protein, 8 aa, HUMAN IMMUNODEFICIENCY VIRUS
SSIVGWPA

SEQ ID NO: 9346 - protein, 9 aa, HUMAN IMMUNODEFICIENCY VIRUS
VGWPAIRER

SEQ ID NO: 9347 - protein, 8 aa, HUMAN IMMUNODEFICIENCY VIRUS
AAEGVGAA

SEQ ID NO: 9348 - protein, 8 aa, HUMAN IMMUNODEFICIENCY VIRUS
FDSRLAFH

SEQ ID NO: 9349 - protein, 9 aa, HUMAN IMMUNODEFICIENCY VIRUS
FDSRLAFHH

SEQ ID NO: 9350 - protein, 8 aa, HUMAN IMMUNODEFICIENCY VIRUS
DSRLAFHH

SEQ ID NO: 9351 - protein, 8 aa, HUMAN IMMUNODEFICIENCY VIRUS
AVSQDLDK

SEQ ID NO: 9352 - protein, 8 aa, HUMAN IMMUNODEFICIENCY VIRUS
PLRPMTFK

SEQ ID NO: 9353 - protein, 8 aa, HUMAN IMMUNODEFICIENCY VIRUS
KGAFDLSF

SEQ ID NO: 9354 - protein, 8 aa, HUMAN IMMUNODEFICIENCY VIRUS
GAFDLSFF

SEQ ID NO: 9355 - protein, 9 aa, HUMAN IMMUNODEFICIENCY VIRUS
GAVSQDLDK

SEQ ID NO: 9356 - protein, 9 aa, HUMAN IMMUNODEFICIENCY VIRUS
QVPLRPMTF

SEQ ID NO: 9357 - protein, 9 aa, HUMAN IMMUNODEFICIENCY VIRUS
KGAFDLSFF

SEQ ID NO: 9358 - protein, 9 aa, HUMAN IMMUNODEFICIENCY VIRUS
GLEGLIYSK

SEQ ID NO: 9359 - protein, 9 aa, HUMAN IMMUNODEFICIENCY VIRUS
MARELHPEY

SEQ ID NO: 9360 - protein, 10 aa, HUMAN IMMUNODEFICIENCY VIRUS
VGAVSQDLDK

SEQ ID NO: 9361 - protein, 10 aa, HUMAN IMMUNODEFICIENCY VIRUS
QVPLRPMTFK

SEQ ID NO: 9362 - protein, 10 aa, HUMAN IMMUNODEFICIENCY VIRUS
GAFDLSFFLK

SEQ ID NO: 9363 - protein, 10 aa, HUMAN IMMUNODEFICIENCY VIRUS
GGLEGLIYSK

SEQ ID NO: 9364 - protein, 10 aa, HUMAN IMMUNODEFICIENCY VIRUS
CFKLVPVDPR

SEQ ID NO: 9365 - protein, 10 aa, HUMAN IMMUNODEFICIENCY VIRUS
HMARELHPEY

SEQ ID NO: 9366 - protein, 10 aa, HUMAN IMMUNODEFICIENCY VIRUS
MARELHPEYY

SEQ ID NO: 9367 - protein, 11 aa, HUMAN IMMUNODEFICIENCY VIRUS
GVGAVSQDLDK

SEQ ID NO: 9368 - protein, 11 aa, HUMAN IMMUNODEFICIENCY VIRUS
KGAFDLSFFLK

SEQ ID NO: 9369 - protein, 11 aa, HUMAN IMMUNODEFICIENCY VIRUS
KGGLEGLIYSK

SEQ ID NO: 9370 - protein, 11 aa, HUMAN IMMUNODEFICIENCY VIRUS
WCFKLVPVDPR

SEQ ID NO: 9371 - protein, 11 aa, HUMAN IMMUNODEFICIENCY VIRUS
HMARELHPEYY

SEQ ID NO: 9372 - protein, 11 aa, HUMAN IMMUNODEFICIENCY VIRUS
MARELHPEYYK

SEQ ID NO: 9373 - protein, 8 aa, HUMAN IMMUNODEFICIENCY VIRUS
AVSRDLEK

SEQ ID NO: 9374 - protein, 8 aa, HUMAN IMMUNODEFICIENCY VIRUS
VSRDLEKH

SEQ ID NO: 9375 - protein, 8 aa, HUMAN IMMUNODEFICIENCY VIRUS
KLVPVDPR

SEQ ID NO: 9376 - protein, 9 aa, HUMAN IMMUNODEFICIENCY VIRUS
GAVSRDLEK

SEQ ID NO: 9377 - protein, 9 aa, HUMAN IMMUNODEFICIENCY VIRUS
AVSRDLEKH

SEQ ID NO: 9378 - protein, 10 aa, HUMAN IMMUNODEFICIENCY VIRUS
VGAVSRDLEK

SEQ ID NO: 9379 - protein, 10 aa, HUMAN IMMUNODEFICIENCY VIRUS
GAVSRDLEKH

SEQ ID NO: 9380 - protein, 10 aa, HUMAN IMMUNODEFICIENCY VIRUS
VSRDLEKHGA

SEQ ID NO: 9381 - protein, 10 aa, HUMAN IMMUNODEFICIENCY VIRUS
NSLLHPICQH

SEQ ID NO: 9382 - protein, 11 aa, HUMAN IMMUNODEFICIENCY VIRUS
GVGAVSRDLEK

SEQ ID NO: 9383 - protein, 11 aa, HUMAN IMMUNODEFICIENCY VIRUS
VGAVSRDLEKH

SEQ ID NO: 9384 - protein, 11 aa, HUMAN IMMUNODEFICIENCY VIRUS
AVSRDLEKHGA

SEQ ID NO: 9385 - protein, 8 aa, HUMAN IMMUNODEFICIENCY VIRUS
AATNADCA

SEQ ID NO: 9386 - protein, 11 aa, HUMAN IMMUNODEFICIENCY VIRUS
ATNADCAWLEA

SEQ ID NO: 9387 - protein, 9 aa, HUMAN IMMUNODEFICIENCY VIRUS
EGENNCLLH

SEQ ID NO: 9388 - protein, 8 aa, HUMAN IMMUNODEFICIENCY VIRUS
PMTYKGAF

SEQ ID NO: 9389 - protein, 8 aa, HUMAN IMMUNODEFICIENCY VIRUS
YTPGPGVR

SEQ ID NO: 9390 - protein, 9 aa, HUMAN IMMUNODEFICIENCY VIRUS
TAATNADCA

SEQ ID NO: 9391 - protein, 9 aa, HUMAN IMMUNODEFICIENCY VIRUS
DILDLWVYH

SEQ ID NO: 9392 - protein, 10 aa, HUMAN IMMUNODEFICIENCY VIRUS
NTAATNADCA

SEQ ID NO: 9393 - protein, 10 aa, HUMAN IMMUNODEFICIENCY VIRUS
QDILDLWVYH

SEQ ID NO: 9394 - protein, 11 aa, HUMAN IMMUNODEFICIENCY VIRUS
ITSSNTAATNA

SEQ ID NO: 9395 - protein, 11 aa, HUMAN IMMUNODEFICIENCY VIRUS
PLRPMTYKGAF

SEQ ID NO: 9396 - protein, 9 aa, HUMAN IMMUNODEFICIENCY VIRUS
PGIRYPLTF

SEQ ID NO: 9397 - protein, 9 aa, HUMAN IMMUNODEFICIENCY VIRUS
PGTRFPLTF

SEQ ID NO: 9398 - protein, 9 aa, HUMAN IMMUNODEFICIENCY VIRUS
EGENNSLLH

SEQ ID NO: 9399 - protein, 8 aa, HUMAN IMMUNODEFICIENCY VIRUS
WVYHTQGF

SEQ ID NO: 9400 - protein, 8 aa, HUMAN IMMUNODEFICIENCY VIRUS
GIRYPLTF

SEQ ID NO: 9401 - protein, 8 aa, HUMAN IMMUNODEFICIENCY VIRUS
GTRFPLTF

SEQ ID NO: 9402 - protein, 9 aa, HUMAN IMMUNODEFICIENCY VIRUS
SSNTAATNA

SEQ ID NO: 9403 - protein, 9 aa, HUMAN IMMUNODEFICIENCY VIRUS
WVYHTQGFF

SEQ ID NO: 9404 - protein, 9 aa, HUMAN IMMUNODEFICIENCY VIRUS
YTPGPGTRF

SEQ ID NO: 9405 - protein, 10 aa, HUMAN IMMUNODEFICIENCY VIRUS
TSSNTAATNA

SEQ ID NO: 9406 - protein, 10 aa, HUMAN IMMUNODEFICIENCY VIRUS
VDLSHFLKEK

SEQ ID NO: 9407 - protein, 10 aa, HUMAN IMMUNODEFICIENCY VIRUS
DLWVYHTQGF

SEQ ID NO: 9408 - protein, 11 aa, HUMAN IMMUNODEFICIENCY VIRUS
AVDLSHFLKEK

SEQ ID NO: 9409 - protein, 11 aa, HUMAN IMMUNODEFICIENCY VIRUS
LDLWVYHTQGF

SEQ ID NO: 9410 - protein, 11 aa, HUMAN IMMUNODEFICIENCY VIRUS
DLWVYHTQGFF

SEQ ID NO: 9411 - protein, 11 aa, HUMAN IMMUNODEFICIENCY VIRUS
PGPGIRYPLTF

SEQ ID NO: 9412 - protein, 11 aa, HUMAN IMMUNODEFICIENCY VIRUS
PGPGTRFPLTF

SEQ ID NO: 9413 - protein, 8 aa, HUMAN IMMUNODEFICIENCY VIRUS
VDLSHFLK

SEQ ID NO: 9414 - protein, 8 aa, HUMAN IMMUNODEFICIENCY VIRUS
DGLIYSKK

SEQ ID NO: 9415 - protein, 8 aa, HUMAN IMMUNODEFICIENCY VIRUS
ELHPEFYK

SEQ ID NO: 9416 - protein, 9 aa, HUMAN IMMUNODEFICIENCY VIRUS
AITSSNTAA

SEQ ID NO: 9417 - protein, 9 aa, HUMAN IMMUNODEFICIENCY VIRUS
AVDLSHFLK

SEQ ID NO: 9418 - protein, 9 aa, HUMAN IMMUNODEFICIENCY VIRUS
LDGLIYSKK

SEQ ID NO: 9419 - protein, 9 aa, HUMAN IMMUNODEFICIENCY VIRUS
DGLIYSKKR

SEQ ID NO: 9420 - protein, 9 aa, HUMAN IMMUNODEFICIENCY VIRUS
SLLHPICQH

SEQ ID NO: 9421 - protein, 10 aa, HUMAN IMMUNODEFICIENCY VIRUS
GAITSSNTAA

SEQ ID NO: 9422 - protein, 10 aa, HUMAN IMMUNODEFICIENCY VIRUS
GLDGLIYSKK

SEQ ID NO: 9423 - protein, 10 aa, HUMAN IMMUNODEFICIENCY VIRUS
LDGLIYSKKR

SEQ ID NO: 9424 - protein, 11 aa, HUMAN IMMUNODEFICIENCY VIRUS
HGAITSSNTAA

SEQ ID NO: 9425 - protein, 11 aa, HUMAN IMMUNODEFICIENCY VIRUS
GGLDGLIYSKK

SEQ ID NO: 9426 - protein, 11 aa, HUMAN IMMUNODEFICIENCY VIRUS
GLDGLIYSKKR

SEQ ID NO: 9427 - protein, 8 aa, HUMAN IMMUNODEFICIENCY VIRUS
PAADGVGA

SEQ ID NO: 9428 - protein, 8 aa, HUMAN IMMUNODEFICIENCY VIRUS
ITSSNTAA

SEQ ID NO: 9429 - protein, 9 aa, HUMAN IMMUNODEFICIENCY VIRUS
CLLHPMSQH

SEQ ID NO: 9430 - protein, 10 aa, HUMAN IMMUNODEFICIENCY VIRUS
NCLLHPMSQH

SEQ ID NO: 9431 - protein, 10 aa, HUMAN IMMUNODEFICIENCY VIRUS
EAQEEEEVGF

SEQ ID NO: 9432 - protein, 8 aa, HUMAN IMMUNODEFICIENCY VIRUS
RDLEKHGA

SEQ ID NO: 9433 - protein, 8 aa, HUMAN IMMUNODEFICIENCY VIRUS
LDGLIYSK

SEQ ID NO: 9434 - protein, 9 aa, HUMAN IMMUNODEFICIENCY VIRUS
GLDGLIYSK

SEQ ID NO: 9435 - protein, 10 aa, HUMAN IMMUNODEFICIENCY VIRUS
GGLDGLIYSK

SEQ ID NO: 9436 - protein, 11 aa, HUMAN IMMUNODEFICIENCY VIRUS
KGGLDGLIYSK

SEQ ID NO: 9437 - protein, 10 aa, HUMAN IMMUNODEFICIENCY VIRUS
RFPLTFGWCF

SEQ ID NO: 9438 - protein, 11 aa, HUMAN IMMUNODEFICIENCY VIRUS
RFPLTFGWCFK

SEQ ID NO: 9439 - protein, 8 aa, HUMAN IMMUNODEFICIENCY VIRUS
ADCAWLEA

SEQ ID NO: 9440 - protein, 8 aa, HUMAN IMMUNODEFICIENCY VIRUS
FFPDWQNY

SEQ ID NO: 9441 - protein, 8 aa, HUMAN IMMUNODEFICIENCY VIRUS
LLHPMSQH

SEQ ID NO: 9442 - protein, 9 aa, HUMAN IMMUNODEFICIENCY VIRUS
NADCAWLEA

SEQ ID NO: 9443 - protein, 9 aa, HUMAN IMMUNODEFICIENCY VIRUS
GFFPDWQNY

SEQ ID NO: 9444 - protein, 9 aa, HUMAN IMMUNODEFICIENCY VIRUS
YTPGPGIRY

SEQ ID NO: 9445 - protein, 10 aa, HUMAN IMMUNODEFICIENCY VIRUS
FDLSFFLKEK

SEQ ID NO: 9446 - protein, 10 aa, HUMAN IMMUNODEFICIENCY VIRUS
QGFFPDWQNY

SEQ ID NO: 9447 - protein, 11 aa, HUMAN IMMUNODEFICIENCY VIRUS
AFDLSFFLKEK

SEQ ID NO: 9448 - protein, 8 aa, HUMAN IMMUNODEFICIENCY VIRUS
FDLSFFLK

SEQ ID NO: 9449 - protein, 8 aa, HUMAN IMMUNODEFICIENCY VIRUS
LLHPICQH

SEQ ID NO: 9450 - protein, 9 aa, HUMAN IMMUNODEFICIENCY VIRUS
AFDLSFFLK

SEQ ID NO: 9451 - protein, 8 aa, HUMAN IMMUNODEFICIENCY VIRUS
GGLEGLIY

SEQ ID NO: 9452 - protein, 9 aa, HUMAN IMMUNODEFICIENCY VIRUS
KGGLEGLIY

SEQ ID NO: 9453 - protein, 8 aa, HUMAN IMMUNODEFICIENCY VIRUS
DILDLWVY

SEQ ID NO: 9454 - protein, 8 aa, HUMAN IMMUNODEFICIENCY VIRUS
YTPGPGIR

SEQ ID NO: 9455 - protein, 9 aa, HUMAN IMMUNODEFICIENCY VIRUS
QDILDLWVY

SEQ ID NO: 9456 - protein, 10 aa, HUMAN IMMUNODEFICIENCY VIRUS
PLRPMTYKAA

SEQ ID NO: 9457 - protein, 11 aa, HUMAN IMMUNODEFICIENCY VIRUS
QVPLRPMTYKA

SEQ ID NO: 9458 - protein, 8 aa, HUMAN IMMUNODEFICIENCY VIRUS
PAAEGVGA

SEQ ID NO: 9459 - protein, 8 aa, HUMAN IMMUNODEFICIENCY VIRUS
GGLDGLIY

SEQ ID NO: 9460 - protein, 8 aa, HUMAN IMMUNODEFICIENCY VIRUS
WVYHTQGY

SEQ ID NO: 9461 - protein, 8 aa, HUMAN IMMUNODEFICIENCY VIRUS
YTPGPGTR

SEQ ID NO: 9462 - protein, 9 aa, HUMAN IMMUNODEFICIENCY VIRUS
PLRPMTYKA

SEQ ID NO: 9463 - protein, 9 aa, HUMAN IMMUNODEFICIENCY VIRUS
KGGLDGLIY

SEQ ID NO: 9464 - protein, 9 aa, HUMAN IMMUNODEFICIENCY VIRUS
WVYHTQGYF

SEQ ID NO: 9465 - protein, 10 aa, HUMAN IMMUNODEFICIENCY VIRUS
DLWVYHTQGY

SEQ ID NO: 9466 - protein, 11 aa, HUMAN IMMUNODEFICIENCY VIRUS
LDLWVYHTQGY

SEQ ID NO: 9467 - protein, 11 aa, HUMAN IMMUNODEFICIENCY VIRUS
DLWVYHTQGYF

SEQ ID NO: 9468 - protein, 8 aa, HUMAN IMMUNODEFICIENCY VIRUS
LSFFLKEK

SEQ ID NO: 9469 - protein, 8 aa, HUMAN IMMUNODEFICIENCY VIRUS
ELHPEYYK

SEQ ID NO: 9470 - protein, 9 aa, HUMAN IMMUNODEFICIENCY VIRUS
DLSFFLKEK

SEQ ID NO: 9471 - protein, 9 aa, HUMAN IMMUNODEFICIENCY VIRUS
EILDLWVYH

SEQ ID NO: 9472 - protein, 8 aa, HUMAN IMMUNODEFICIENCY VIRUS
GLIYSKKR

SEQ ID NO: 9473 - protein, 10 aa, HUMAN IMMUNODEFICIENCY VIRUS
PLRPMTYKGA

SEQ ID NO: 9474 - protein, 8 aa, HUMAN IMMUNODEFICIENCY VIRUS
AITSSNTA

SEQ ID NO: 9475 - protein, 8 aa, HUMAN IMMUNODEFICIENCY VIRUS
LSHFLKEK

SEQ ID NO: 9476 - protein, 9 aa, HUMAN IMMUNODEFICIENCY VIRUS
GAITSSNTA

SEQ ID NO: 9477 - protein, 9 aa, HUMAN IMMUNODEFICIENCY VIRUS
DLSHFLKEK

SEQ ID NO: 9478 - protein, 10 aa, HUMAN IMMUNODEFICIENCY VIRUS
HGAITSSNTA

SEQ ID NO: 9479 - protein, 8 aa, HUMAN IMMUNODEFICIENCY VIRUS
EILDLWVY

SEQ ID NO: 9480 - protein, 8 aa, HUMAN IMMUNODEFICIENCY VIRUS
ILDLWVYH

SEQ ID NO: 9481 - protein, 8 aa, HUMAN IMMUNODEFICIENCY VIRUS
YFPDWQNY

SEQ ID NO: 9482 - protein, 10 aa, HUMAN IMMUNODEFICIENCY VIRUS
QGYFPDWQNY

SEQ ID NO: 9483 - protein, 8 aa, HUMAN IMMUNODEFICIENCY VIRUS
LTFGWCFK

SEQ ID NO: 9484 - protein, 9 aa, HUMAN IMMUNODEFICIENCY VIRUS
PLTFGWCFK

SEQ ID NO: 9485 - protein, 8 aa, HUMAN IMMUNODEFICIENCY VIRUS
PLTFGWCF

SEQ ID NO: 9486 - protein, 9 aa, HUMAN IMMUNODEFICIENCY VIRUS
QVPLRPMTY

SEQ ID NO: 9487 - protein, 10 aa, HUMAN IMMUNODEFICIENCY VIRUS
QVPLRPMTYK

SEQ ID NO: 9488 - protein, 9 aa, HUMAN IMMUNODEFICIENCY VIRUS
PVRPQVPLR

SEQ ID NO: 9489 - protein, 11 aa, HUMAN IMMUNODEFICIENCY VIRUS
GFPVRPQVPLR

SEQ ID NO: 9490 - protein, 8 aa, HUMAN IMMUNODEFICIENCY VIRUS
PLRPMTYK

SEQ ID NO: 9491 - protein, 8 aa, HUMAN IMMUNODEFICIENCY VIRUS
STNSPTSR

SEQ ID NO: 9492 - protein, 8 aa, HUMAN IMMUNODEFICIENCY VIRUS
RANSPSSR

SEQ ID NO: 9493 - protein, 9 aa, HUMAN IMMUNODEFICIENCY VIRUS
NSTNSPTSR

SEQ ID NO: 9494 - protein, 9 aa, HUMAN IMMUNODEFICIENCY VIRUS
PTSRELQVR

SEQ ID NO: 9495 - protein, 10 aa, HUMAN IMMUNODEFICIENCY VIRUS
QTRANSPSSR

SEQ ID NO: 9496 - protein, 10 aa, HUMAN IMMUNODEFICIENCY VIRUS
QTRANSPTTR

SEQ ID NO: 9497 - protein, 11 aa, HUMAN IMMUNODEFICIENCY VIRUS
NSPTSRELQVR

SEQ ID NO: 9498 - protein, 8 aa, HUMAN IMMUNODEFICIENCY VIRUS
RANSPTTR

SEQ ID NO: 9499 - protein, 9 aa, HUMAN IMMUNODEFICIENCY VIRUS
PSSRELQVR

SEQ ID NO: 9500 - protein, 10 aa, HUMAN IMMUNODEFICIENCY VIRUS
PSRANSPTSR

SEQ ID NO: 9501 - protein, 11 aa, HUMAN IMMUNODEFICIENCY VIRUS
NSPSSRELQVR

SEQ ID NO: 9502 - protein, 11 aa, HUMAN IMMUNODEFICIENCY VIRUS
NSPTTRELQVR

SEQ ID NO: 9503 - protein, 9 aa, HUMAN IMMUNODEFICIENCY VIRUS
ADRQGIVSF

SEQ ID NO: 9504 - protein, 9 aa, HUMAN IMMUNODEFICIENCY VIRUS
DDRQGPVSF

SEQ ID NO: 9505 - protein, 10 aa, HUMAN IMMUNODEFICIENCY VIRUS
GADRQGIVSF

SEQ ID NO: 9506 - protein, 10 aa, HUMAN IMMUNODEFICIENCY VIRUS
GDDRQGPVSF

SEQ ID NO: 9507 - protein, 11 aa, HUMAN IMMUNODEFICIENCY VIRUS
ADRQGIVSFNF

SEQ ID NO: 9508 - protein, 11 aa, HUMAN IMMUNODEFICIENCY VIRUS
DDRQGPVSFSF

SEQ ID NO: 9509 - protein, 11 aa, HUMAN IMMUNODEFICIENCY VIRUS
AGADRQGIVSF

SEQ ID NO: 9510 - protein, 11 aa, HUMAN IMMUNODEFICIENCY VIRUS
AGDDRQGPVSF

SEQ ID NO: 9511 - protein, 11 aa, HUMAN IMMUNODEFICIENCY VIRUS
GTTLNFPQITF

SEQ ID NO: 9512 - protein, 9 aa, HUMAN IMMUNODEFICIENCY VIRUS
NLAFPQGEA

SEQ ID NO: 9513 - protein, 10 aa, HUMAN IMMUNODEFICIENCY VIRUS
NLAFPQGEAR

SEQ ID NO: 9514 - protein, 11 aa, HUMAN IMMUNODEFICIENCY VIRUS
KTGKYAKMRTA

SEQ ID NO: 9515 - protein, 8 aa, HUMAN IMMUNODEFICIENCY VIRUS
ILIEICGH

SEQ ID NO: 9516 - protein, 8 aa, HUMAN IMMUNODEFICIENCY VIRUS
LIEICGHK

SEQ ID NO: 9517 - protein, 8 aa, HUMAN IMMUNODEFICIENCY VIRUS
YAKMRTAH

SEQ ID NO: 9518 - protein, 9 aa, HUMAN IMMUNODEFICIENCY VIRUS
LIEICGHKA

SEQ ID NO: 9519 - protein, 9 aa, HUMAN IMMUNODEFICIENCY VIRUS
RSAHTNDVK

SEQ ID NO: 9520 - protein, 10 aa, HUMAN IMMUNODEFICIENCY VIRUS
AFPQGEAREF

SEQ ID NO: 9521 - protein, 10 aa, HUMAN IMMUNODEFICIENCY VIRUS
LIEALLDTGA

SEQ ID NO: 9522 - protein, 10 aa, HUMAN IMMUNODEFICIENCY VIRUS
TGKYAKMRTA

SEQ ID NO: 9523 - protein, 10 aa, HUMAN IMMUNODEFICIENCY VIRUS
ETWETWWTDY

SEQ ID NO: 9524 - protein, 10 aa, HUMAN IMMUNODEFICIENCY VIRUS
ETWETWWTEY

SEQ ID NO: 9525 - protein, 10 aa, HUMAN IMMUNODEFICIENCY VIRUS
ETWWTDYWQA

SEQ ID NO: 9526 - protein, 10 aa, HUMAN IMMUNODEFICIENCY VIRUS
VSLTDTTNQK

SEQ ID NO: 9527 - protein, 11 aa, HUMAN IMMUNODEFICIENCY VIRUS
LAFPQGEAREF

SEQ ID NO: 9528 - protein, 11 aa, HUMAN IMMUNODEFICIENCY VIRUS
QLIEALLDTGA

SEQ ID NO: 9529 - protein, 11 aa, HUMAN IMMUNODEFICIENCY VIRUS
MLTQLGCTLNF

SEQ ID NO: 9530 - protein, 11 aa, HUMAN IMMUNODEFICIENCY VIRUS
TGKYAKMRTAH

SEQ ID NO: 9531 - protein, 11 aa, HUMAN IMMUNODEFICIENCY VIRUS
VVSLTDTTNQK

SEQ ID NO: 9532 - protein, 11 aa, HUMAN IMMUNODEFICIENCY VIRUS
QTKELQKQIIK

SEQ ID NO: 9533 - protein, 10 aa, HUMAN IMMUNODEFICIENCY VIRUS
QTRANSPTRR

SEQ ID NO: 9534 - protein, 11 aa, HUMAN IMMUNODEFICIENCY VIRUS
LDGIDKAQEDH

SEQ ID NO: 9535 - protein, 8 aa, HUMAN IMMUNODEFICIENCY VIRUS
IGGFIKVK

SEQ ID NO: 9536 - protein, 8 aa, HUMAN IMMUNODEFICIENCY VIRUS
RIGPENPY

SEQ ID NO: 9537 - protein, 8 aa, HUMAN IMMUNODEFICIENCY VIRUS
VIPLTEEA

SEQ ID NO: 9538 - protein, 8 aa, HUMAN IMMUNODEFICIENCY VIRUS
TAHTNDVK

SEQ ID NO: 9539 - protein, 8 aa, HUMAN IMMUNODEFICIENCY VIRUS
QLTEVVQK

SEQ ID NO: 9540 - protein, 8 aa, HUMAN IMMUNODEFICIENCY VIRUS
IDKAQEDH

SEQ ID NO: 9541 - protein, 8 aa, HUMAN IMMUNODEFICIENCY VIRUS
WAGIQQEF

SEQ ID NO: 9542 - protein, 8 aa, HUMAN IMMUNODEFICIENCY VIRUS
VVPRRKVK

SEQ ID NO: 9543 - protein, 8 aa, HUMAN IMMUNODEFICIENCY VIRUS
KIIKDYGK

SEQ ID NO: 9544 - protein, 9 aa, HUMAN IMMUNODEFICIENCY VIRUS
GIGGFIKVK

SEQ ID NO: 9545 - protein, 9 aa, HUMAN IMMUNODEFICIENCY VIRUS
EVIPLTEEA

SEQ ID NO: 9546 - protein, 9 aa, HUMAN IMMUNODEFICIENCY VIRUS
SLTDTTNQK

SEQ ID NO: 9547 - protein, 9 aa, HUMAN IMMUNODEFICIENCY VIRUS
GIDKAQEDH

SEQ ID NO: 9548 - protein, 9 aa, HUMAN IMMUNODEFICIENCY VIRUS
KVVPRRKVK

SEQ ID NO: 9549 - protein, 10 aa, HUMAN IMMUNODEFICIENCY VIRUS
GGIGGFIKVK

SEQ ID NO: 9550 - protein, 10 aa, HUMAN IMMUNODEFICIENCY VIRUS
ISRIGPENPY

SEQ ID NO: 9551 - protein, 10 aa, HUMAN IMMUNODEFICIENCY VIRUS
STNNETPGIR

SEQ ID NO: 9552 - protein, 10 aa, HUMAN IMMUNODEFICIENCY VIRUS
ESWTVNDIQK

SEQ ID NO: 9553 - protein, 10 aa, HUMAN IMMUNODEFICIENCY VIRUS
ETTNQKTELH

SEQ ID NO: 9554 - protein, 10 aa, HUMAN IMMUNODEFICIENCY VIRUS
DGIDKAQEDH

SEQ ID NO: 9555 - protein, 10 aa, HUMAN IMMUNODEFICIENCY VIRUS
GSNFTSTTVK

SEQ ID NO: 9556 - protein, 10 aa, HUMAN IMMUNODEFICIENCY VIRUS
GIQQEFGIPY

SEQ ID NO: 9557 - protein, 10 aa, HUMAN IMMUNODEFICIENCY VIRUS
SDIQTKELQK

SEQ ID NO: 9558 - protein, 10 aa, HUMAN IMMUNODEFICIENCY VIRUS
IIKDYGKQMA

SEQ ID NO: 9559 - protein, 11 aa, HUMAN IMMUNODEFICIENCY VIRUS
IGGIGGFIKVK

SEQ ID NO: 9560 - protein, 11 aa, HUMAN IMMUNODEFICIENCY VIRUS
KISRIGPENPY

SEQ ID NO: 9561 - protein, 11 aa, HUMAN IMMUNODEFICIENCY VIRUS
PSTNNETPGIR

SEQ ID NO: 9562 - protein, 11 aa, HUMAN IMMUNODEFICIENCY VIRUS
STNNETPGIRY

SEQ ID NO: 9563 - protein, 11 aa, HUMAN IMMUNODEFICIENCY VIRUS
LTEVIPLTEEA

SEQ ID NO: 9564 - protein, 11 aa, HUMAN IMMUNODEFICIENCY VIRUS
VVSLTETTNQK

SEQ ID NO: 9565 - protein, 11 aa, HUMAN IMMUNODEFICIENCY VIRUS
ETTNQKTELHA

SEQ ID NO: 9566 - protein, 11 aa, HUMAN IMMUNODEFICIENCY VIRUS
NGSNFTSTTVK

SEQ ID NO: 9567 - protein, 11 aa, HUMAN IMMUNODEFICIENCY VIRUS
GSNFTSTTVKA

SEQ ID NO: 9568 - protein, 11 aa, HUMAN IMMUNODEFICIENCY VIRUS
ACWWAGIQQEF

SEQ ID NO: 9569 - protein, 11 aa, HUMAN IMMUNODEFICIENCY VIRUS
AGIQQEFGIPY

SEQ ID NO: 9570 - protein, 11 aa, HUMAN IMMUNODEFICIENCY VIRUS
IDIIASDIQTK

SEQ ID NO: 9571 - protein, 11 aa, HUMAN IMMUNODEFICIENCY VIRUS
VDIIATDIQTK

SEQ ID NO: 9572 - protein, 11 aa, HUMAN IMMUNODEFICIENCY VIRUS
ASDIQTKELQK

SEQ ID NO: 9573 - protein, 11 aa, HUMAN IMMUNODEFICIENCY VIRUS
NSEIKVVPRRK

SEQ ID NO: 9574 - protein, 11 aa, HUMAN IMMUNODEFICIENCY VIRUS
KIIKDYGKQMA

SEQ ID NO: 9575 - protein, 8 aa, HUMAN IMMUNODEFICIENCY VIRUS
NSLSEAGA

SEQ ID NO: 9576 - protein, 10 aa, HUMAN IMMUNODEFICIENCY VIRUS
QTRANSPTSR

SEQ ID NO: 9577 - protein, 8 aa, HUMAN IMMUNODEFICIENCY VIRUS
IIKIQNFR

SEQ ID NO: 9578 - protein, 9 aa, HUMAN IMMUNODEFICIENCY VIRUS
QIYPGIKVK

SEQ ID NO: 9579 - protein, 9 aa, HUMAN IMMUNODEFICIENCY VIRUS
QDQWTYQIY

SEQ ID NO: 9580 - protein, 10 aa, HUMAN IMMUNODEFICIENCY VIRUS
IIKIQNFRVY

SEQ ID NO: 9581 - protein, 11 aa, HUMAN IMMUNODEFICIENCY VIRUS
ASQIYPGIKVK

SEQ ID NO: 9582 - protein, 11 aa, HUMAN IMMUNODEFICIENCY VIRUS
IIKIQNFRVYY

SEQ ID NO: 9583 - protein, 8 aa, HUMAN IMMUNODEFICIENCY VIRUS
LAFPQGEA

SEQ ID NO: 9584 - protein, 8 aa, HUMAN IMMUNODEFICIENCY VIRUS
LAFPQGKA

SEQ ID NO: 9585 - protein, 8 aa, HUMAN IMMUNODEFICIENCY VIRUS
AFPQGEAR

SEQ ID NO: 9586 - protein, 8 aa, HUMAN IMMUNODEFICIENCY VIRUS
KTELQAIY

SEQ ID NO: 9587 - protein, 8 aa, HUMAN IMMUNODEFICIENCY VIRUS
ELQAIYLA

SEQ ID NO: 9588 - protein, 8 aa, HUMAN IMMUNODEFICIENCY VIRUS
QIIKIQNF

SEQ ID NO: 9589 - protein, 8 aa, HUMAN IMMUNODEFICIENCY VIRUS
KDYGKQMA

SEQ ID NO: 9590 - protein, 9 aa, HUMAN IMMUNODEFICIENCY VIRUS
LAFPQGEAR

SEQ ID NO: 9591 - protein, 9 aa, HUMAN IMMUNODEFICIENCY VIRUS
EINLPGKWK

SEQ ID NO: 9592 - protein, 9 aa, HUMAN IMMUNODEFICIENCY VIRUS
TTNQKTELH

SEQ ID NO: 9593 - protein, 9 aa, HUMAN IMMUNODEFICIENCY VIRUS
QIIKIQNFR

SEQ ID NO: 9594 - protein, 9 aa, HUMAN IMMUNODEFICIENCY VIRUS
VIQDNSEIK

SEQ ID NO: 9595 - protein, 9 aa, HUMAN IMMUNODEFICIENCY VIRUS
NSEIKVVPR

SEQ ID NO: 9596 - protein, 10 aa, HUMAN IMMUNODEFICIENCY VIRUS
VLEEINLPGK

SEQ ID NO: 9597 - protein, 10 aa, HUMAN IMMUNODEFICIENCY VIRUS
TTNQKTELHA

SEQ ID NO: 9598 - protein, 10 aa, HUMAN IMMUNODEFICIENCY VIRUS
KTELQAIYLA

SEQ ID NO: 9599 - protein, 10 aa, HUMAN IMMUNODEFICIENCY VIRUS
VVIQDNSEIK

SEQ ID NO: 9600 - protein, 10 aa, HUMAN IMMUNODEFICIENCY VIRUS
NSEIKVVPRR

SEQ ID NO: 9601 - protein, 11 aa, HUMAN IMMUNODEFICIENCY VIRUS
TVLEEINLPGK

SEQ ID NO: 9602 - protein, 11 aa, HUMAN IMMUNODEFICIENCY VIRUS
EINLPGKWKPK

SEQ ID NO: 9603 - protein, 11 aa, HUMAN IMMUNODEFICIENCY VIRUS
ELRQHLLRWGF

SEQ ID NO: 9604 - protein, 11 aa, HUMAN IMMUNODEFICIENCY VIRUS
QGQDQWTYQIY

SEQ ID NO: 9605 - protein, 11 aa, HUMAN IMMUNODEFICIENCY VIRUS
RMRGAHTNDVK

SEQ ID NO: 9606 - protein, 11 aa, HUMAN IMMUNODEFICIENCY VIRUS
QIIKIQNFRVY

SEQ ID NO: 9607 - protein, 11 aa, HUMAN IMMUNODEFICIENCY VIRUS
AVVIQDNSEIK

SEQ ID NO: 9608 - protein, 11 aa, HUMAN IMMUNODEFICIENCY VIRUS
QDNSEIKVVPR

SEQ ID NO: 9609 - protein, 8 aa, HUMAN IMMUNODEFICIENCY VIRUS
ELQKQIIK

SEQ ID NO: 9610 - protein, 9 aa, HUMAN IMMUNODEFICIENCY VIRUS
EFSSEQTRA

SEQ ID NO: 9611 - protein, 9 aa, HUMAN IMMUNODEFICIENCY VIRUS
KTGKYARMR

SEQ ID NO: 9612 - protein, 11 aa, HUMAN IMMUNODEFICIENCY VIRUS
NLKTGKYARMR

SEQ ID NO: 9613 - protein, 11 aa, HUMAN IMMUNODEFICIENCY VIRUS
KTGKYARMRGA

SEQ ID NO: 9614 - protein, 8 aa, HUMAN IMMUNODEFICIENCY VIRUS
EDINLPGK

SEQ ID NO: 9615 - protein, 8 aa, HUMAN IMMUNODEFICIENCY VIRUS
IVPLTEEA

SEQ ID NO: 9616 - protein, 8 aa, HUMAN IMMUNODEFICIENCY VIRUS
TGKYARMR

SEQ ID NO: 9617 - protein, 8 aa, HUMAN IMMUNODEFICIENCY VIRUS
YARMRGAH

SEQ ID NO: 9618 - protein, 8 aa, HUMAN IMMUNODEFICIENCY VIRUS
IGQVREQA

SEQ ID NO: 9619 - protein, 8 aa, HUMAN IMMUNODEFICIENCY VIRUS
QVREQAEH

SEQ ID NO: 9620 - protein, 9 aa, HUMAN IMMUNODEFICIENCY VIRUS
DINLPGKWK

SEQ ID NO: 9621 - protein, 9 aa, HUMAN IMMUNODEFICIENCY VIRUS
LIEICGKKA

SEQ ID NO: 9622 - protein, 9 aa, HUMAN IMMUNODEFICIENCY VIRUS
DIVPLTEEA

SEQ ID NO: 9623 - protein, 9 aa, HUMAN IMMUNODEFICIENCY VIRUS
IIGQVREQA

SEQ ID NO: 9624 - protein, 10 aa, HUMAN IMMUNODEFICIENCY VIRUS
VLEDINLPGK

SEQ ID NO: 9625 - protein, 10 aa, HUMAN IMMUNODEFICIENCY VIRUS
EDINLPGKWK

SEQ ID NO: 9626 - protein, 10 aa, HUMAN IMMUNODEFICIENCY VIRUS
ILIEICGKKA

SEQ ID NO: 9627 - protein, 10 aa, HUMAN IMMUNODEFICIENCY VIRUS
RAKIEELREH

SEQ ID NO: 9628 - protein, 10 aa, HUMAN IMMUNODEFICIENCY VIRUS
TVQPIVLPEK

SEQ ID NO: 9629 - protein, 10 aa, HUMAN IMMUNODEFICIENCY VIRUS
TDIVPLTEEA

SEQ ID NO: 9630 - protein, 10 aa, HUMAN IMMUNODEFICIENCY VIRUS
TGKYARMRGA

SEQ ID NO: 9631 - protein, 10 aa, HUMAN IMMUNODEFICIENCY VIRUS
AGRWPVKTIH

SEQ ID NO: 9632 - protein, 10 aa, HUMAN IMMUNODEFICIENCY VIRUS
KIIGQVREQA

SEQ ID NO: 9633 - protein, 10 aa, HUMAN IMMUNODEFICIENCY VIRUS
IGQVREQAEH

SEQ ID NO: 9634 - protein, 10 aa, HUMAN IMMUNODEFICIENCY VIRUS
QVREQAEHLK

SEQ ID NO: 9635 - protein, 10 aa, HUMAN IMMUNODEFICIENCY VIRUS
EIKVVPRRKA

SEQ ID NO: 9636 - protein, 11 aa, HUMAN IMMUNODEFICIENCY VIRUS
TLWQRPLVTVK

SEQ ID NO: 9637 - protein, 11 aa, HUMAN IMMUNODEFICIENCY VIRUS
LVTIKIGGQLK

SEQ ID NO: 9638 - protein, 11 aa, HUMAN IMMUNODEFICIENCY VIRUS
TVLEDINLPGK

SEQ ID NO: 9639 - protein, 11 aa, HUMAN IMMUNODEFICIENCY VIRUS
DINLPGKWKPK

SEQ ID NO: 9640 - protein, 11 aa, HUMAN IMMUNODEFICIENCY VIRUS
QILIEICGKKA

SEQ ID NO: 9641 - protein, 11 aa, HUMAN IMMUNODEFICIENCY VIRUS
KIEELREHLLK

SEQ ID NO: 9642 - protein, 11 aa, HUMAN IMMUNODEFICIENCY VIRUS
WTVQPIVLPEK

SEQ ID NO: 9643 - protein, 11 aa, HUMAN IMMUNODEFICIENCY VIRUS
LTDIVPLTEEA

SEQ ID NO: 9644 - protein, 11 aa, HUMAN IMMUNODEFICIENCY VIRUS
TGKYARMRGAH

SEQ ID NO: 9645 - protein, 11 aa, HUMAN IMMUNODEFICIENCY VIRUS
LAGRWPVKTIH

SEQ ID NO: 9646 - protein, 11 aa, HUMAN IMMUNODEFICIENCY VIRUS
IIGQVREQAEH

SEQ ID NO: 9647 - protein, 11 aa, HUMAN IMMUNODEFICIENCY VIRUS
DSRDPLWKGPA

SEQ ID NO: 9648 - protein, 11 aa, HUMAN IMMUNODEFICIENCY VIRUS
EIKVVPRRKAK

SEQ ID NO: 9649 - protein, 8 aa, HUMAN IMMUNODEFICIENCY VIRUS
EFSSEQTR

SEQ ID NO: 9650 - protein, 9 aa, HUMAN IMMUNODEFICIENCY VIRUS
QIYPGIKVR

SEQ ID NO: 9651 - protein, 11 aa, HUMAN IMMUNODEFICIENCY VIRUS
ASQIYPGIKVR

SEQ ID NO: 9652 - protein, 11 aa, HUMAN IMMUNODEFICIENCY VIRUS
IATESIVIWGK

SEQ ID NO: 9653 - protein, 8 aa, HUMAN IMMUNODEFICIENCY VIRUS
ILIEICGK

SEQ ID NO: 9654 - protein, 8 aa, HUMAN IMMUNODEFICIENCY VIRUS
LIEICGKK

SEQ ID NO: 9655 - protein, 8 aa, HUMAN IMMUNODEFICIENCY VIRUS
NFTSTTVK

SEQ ID NO: 9656 - protein, 8 aa, HUMAN IMMUNODEFICIENCY VIRUS
FTSTTVKA

SEQ ID NO: 9657 - protein, 8 aa, HUMAN IMMUNODEFICIENCY VIRUS
TSTTVKAA

SEQ ID NO: 9658 - protein, 8 aa, HUMAN IMMUNODEFICIENCY VIRUS
IASDIQTK

SEQ ID NO: 9659 - protein, 8 aa, HUMAN IMMUNODEFICIENCY VIRUS
DSRDPLWK

SEQ ID NO: 9660 - protein, 9 aa, HUMAN IMMUNODEFICIENCY VIRUS
QILIEICGK

SEQ ID NO: 9661 - protein, 9 aa, HUMAN IMMUNODEFICIENCY VIRUS
ILIEICGKK

SEQ ID NO: 9662 - protein, 9 aa, HUMAN IMMUNODEFICIENCY VIRUS
NFTSTTVKA

SEQ ID NO: 9663 - protein, 9 aa, HUMAN IMMUNODEFICIENCY VIRUS
FTSTTVKAA

SEQ ID NO: 9664 - protein, 9 aa, HUMAN IMMUNODEFICIENCY VIRUS
IIASDIQTK

SEQ ID NO: 9665 - protein, 9 aa, HUMAN IMMUNODEFICIENCY VIRUS
RDSRDPLWK

SEQ ID NO: 9666 - protein, 9 aa, HUMAN IMMUNODEFICIENCY VIRUS
RDPLWKGPA

SEQ ID NO: 9667 - protein, 10 aa, HUMAN IMMUNODEFICIENCY VIRUS
QILIEICGKK

SEQ ID NO: 9668 - protein, 10 aa, HUMAN IMMUNODEFICIENCY VIRUS
RTKIEELRQH

SEQ ID NO: 9669 - protein, 10 aa, HUMAN IMMUNODEFICIENCY VIRUS
PGIKVRQLCK

SEQ ID NO: 9670 - protein, 10 aa, HUMAN IMMUNODEFICIENCY VIRUS
TIHTDNGSNF

SEQ ID NO: 9671 - protein, 10 aa, HUMAN IMMUNODEFICIENCY VIRUS
NFTSTTVKAA

SEQ ID NO: 9672 - protein, 10 aa, HUMAN IMMUNODEFICIENCY VIRUS
TTVKAACWWA

SEQ ID NO: 9673 - protein, 10 aa, HUMAN IMMUNODEFICIENCY VIRUS
AGERIVDIIA

SEQ ID NO: 9674 - protein, 10 aa, HUMAN IMMUNODEFICIENCY VIRUS
DIIASDIQTK

SEQ ID NO: 9675 - protein, 10 aa, HUMAN IMMUNODEFICIENCY VIRUS
RDPLWKGPAK

SEQ ID NO: 9676 - protein, 11 aa, HUMAN IMMUNODEFICIENCY VIRUS
FSFPQITLWQR

SEQ ID NO: 9677 - protein, 11 aa, HUMAN IMMUNODEFICIENCY VIRUS
YDQILIEICGK

SEQ ID NO: 9678 - protein, 11 aa, HUMAN IMMUNODEFICIENCY VIRUS
ELREHLLKWGF

SEQ ID NO: 9679 - protein, 11 aa, HUMAN IMMUNODEFICIENCY VIRUS
KTPKFKLPIQK

SEQ ID NO: 9680 - protein, 11 aa, HUMAN IMMUNODEFICIENCY VIRUS
GIDKAQEEHER

SEQ ID NO: 9681 - protein, 11 aa, HUMAN IMMUNODEFICIENCY VIRUS
STTVKAACWWA

SEQ ID NO: 9682 - protein, 11 aa, HUMAN IMMUNODEFICIENCY VIRUS
SAGERIVDIIA

SEQ ID NO: 9683 - protein, 9 aa, HUMAN IMMUNODEFICIENCY VIRUS
QTRANSPTR

SEQ ID NO: 9684 - protein, 10 aa, HUMAN IMMUNODEFICIENCY VIRUS
LVEICTEMEK

SEQ ID NO: 9685 - protein, 8 aa, HUMAN IMMUNODEFICIENCY VIRUS
FFREDLAF

SEQ ID NO: 9686 - protein, 8 aa, HUMAN IMMUNODEFICIENCY VIRUS
FSSEQTRA

SEQ ID NO: 9687 - protein, 8 aa, HUMAN IMMUNODEFICIENCY VIRUS
ELRQHLLR

SEQ ID NO: 9688 - protein, 8 aa, HUMAN IMMUNODEFICIENCY VIRUS
QGQDQWTY

SEQ ID NO: 9689 - protein, 8 aa, HUMAN IMMUNODEFICIENCY VIRUS
KTELQAIH

SEQ ID NO: 9690 - protein, 8 aa, HUMAN IMMUNODEFICIENCY VIRUS
AGIRKVLF

SEQ ID NO: 9691 - protein, 9 aa, HUMAN IMMUNODEFICIENCY VIRUS
PIQKETWEA

SEQ ID NO: 9692 - protein, 9 aa, HUMAN IMMUNODEFICIENCY VIRUS
SAGIRKVLF

SEQ ID NO: 9693 - protein, 9 aa, HUMAN IMMUNODEFICIENCY VIRUS
EIKVVPRRK

SEQ ID NO: 9694 - protein, 10 aa, HUMAN IMMUNODEFICIENCY VIRUS
LTQLGCTLNF

SEQ ID NO: 9695 - protein, 10 aa, HUMAN IMMUNODEFICIENCY VIRUS
KTELQAIHLA

SEQ ID NO: 9696 - protein, 10 aa, HUMAN IMMUNODEFICIENCY VIRUS
LGIIQAQPDR

SEQ ID NO: 9697 - protein, 10 aa, HUMAN IMMUNODEFICIENCY VIRUS
VDKLVSAGIR

SEQ ID NO: 9698 - protein, 10 aa, HUMAN IMMUNODEFICIENCY VIRUS
VSAGIRKVLF

SEQ ID NO: 9699 - protein, 10 aa, HUMAN IMMUNODEFICIENCY VIRUS
IDKAQEEHER

SEQ ID NO: 9700 - protein, 11 aa, HUMAN IMMUNODEFICIENCY VIRUS
ALVEICTEMEK

SEQ ID NO: 9701 - protein, 11 aa, HUMAN IMMUNODEFICIENCY VIRUS
KIEELRQHLLR

SEQ ID NO: 9702 - protein, 11 aa, HUMAN IMMUNODEFICIENCY VIRUS
ALGIIQAQPDR

SEQ ID NO: 9703 - protein, 11 aa, HUMAN IMMUNODEFICIENCY VIRUS
LVNQIIEQLIK

SEQ ID NO: 9704 - protein, 11 aa, HUMAN IMMUNODEFICIENCY VIRUS
QVDKLVSAGIR

SEQ ID NO: 9705 - protein, 11 aa, HUMAN IMMUNODEFICIENCY VIRUS
VDKLVSAGIRK

SEQ ID NO: 9706 - protein, 11 aa, HUMAN IMMUNODEFICIENCY VIRUS
LVSAGIRKVLF

SEQ ID NO: 9707 - protein, 11 aa, HUMAN IMMUNODEFICIENCY VIRUS
IDKAQEEHERY

SEQ ID NO: 9708 - protein, 8 aa, HUMAN IMMUNODEFICIENCY VIRUS
KAQEEHER

SEQ ID NO: 9709 - protein, 9 aa, HUMAN IMMUNODEFICIENCY VIRUS
NLAFQQGEA

SEQ ID NO: 9710 - protein, 9 aa, HUMAN IMMUNODEFICIENCY VIRUS
KAQEEHERY

SEQ ID NO: 9711 - protein, 10 aa, HUMAN IMMUNODEFICIENCY VIRUS
NLAFQQGEAR

SEQ ID NO: 9712 - protein, 10 aa, HUMAN IMMUNODEFICIENCY VIRUS
KAQEEHERYH

SEQ ID NO: 9713 - protein, 8 aa, HUMAN IMMUNODEFICIENCY VIRUS
LAFQQGEA

SEQ ID NO: 9714 - protein, 8 aa, HUMAN IMMUNODEFICIENCY VIRUS
AFQQGEAR

SEQ ID NO: 9715 - protein, 8 aa, HUMAN IMMUNODEFICIENCY VIRUS
RANSPTRR

SEQ ID NO: 9716 - protein, 8 aa, HUMAN IMMUNODEFICIENCY VIRUS
QLGCTLNF

SEQ ID NO: 9717 - protein, 8 aa, HUMAN IMMUNODEFICIENCY VIRUS
SAHTNDVK

SEQ ID NO: 9718 - protein, 8 aa, HUMAN IMMUNODEFICIENCY VIRUS
ELQAIHLA

SEQ ID NO: 9719 - protein, 8 aa, HUMAN IMMUNODEFICIENCY VIRUS
IIQAQPDR

SEQ ID NO: 9720 - protein, 8 aa, HUMAN IMMUNODEFICIENCY VIRUS
QVDKLVSA

SEQ ID NO: 9721 - protein, 8 aa, HUMAN IMMUNODEFICIENCY VIRUS
KLVSAGIR

SEQ ID NO: 9722 - protein, 8 aa, HUMAN IMMUNODEFICIENCY VIRUS
LVSAGIRK

SEQ ID NO: 9723 - protein, 8 aa, HUMAN IMMUNODEFICIENCY VIRUS
EIKVVPRR

SEQ ID NO: 9724 - protein, 9 aa, HUMAN IMMUNODEFICIENCY VIRUS
LAFQQGEAR

SEQ ID NO: 9725 - protein, 9 aa, HUMAN IMMUNODEFICIENCY VIRUS
GIIQAQPDR

SEQ ID NO: 9726 - protein, 9 aa, HUMAN IMMUNODEFICIENCY VIRUS
KLVSAGIRK

SEQ ID NO: 9727 - protein, 10 aa, HUMAN IMMUNODEFICIENCY VIRUS
QLEKEPIVGA

SEQ ID NO: 9728 - protein, 8 aa, HUMAN IMMUNODEFICIENCY VIRUS
RANSPTSR

SEQ ID NO: 9729 - protein, 8 aa, HUMAN IMMUNODEFICIENCY VIRUS
KIEELRQH

SEQ ID NO: 9730 - protein, 8 aa, HUMAN IMMUNODEFICIENCY VIRUS
ELREHLLK

SEQ ID NO: 9731 - protein, 8 aa, HUMAN IMMUNODEFICIENCY VIRUS
WGKTPKFK

SEQ ID NO: 9732 - protein, 9 aa, HUMAN IMMUNODEFICIENCY VIRUS
TIKIGGQLK

SEQ ID NO: 9733 - protein, 10 aa, HUMAN IMMUNODEFICIENCY VIRUS
VTIKIGGQLK

SEQ ID NO: 9734 - protein, 10 aa, HUMAN IMMUNODEFICIENCY VIRUS
TVQPIQLPEK

SEQ ID NO: 9735 - protein, 10 aa, HUMAN IMMUNODEFICIENCY VIRUS
VIWGKTPKFK

SEQ ID NO: 9736 - protein, 11 aa, HUMAN IMMUNODEFICIENCY VIRUS
TLWQRPLVTIK

SEQ ID NO: 9737 - protein, 11 aa, HUMAN IMMUNODEFICIENCY VIRUS
TIKIGGQLKEA

SEQ ID NO: 9738 - protein, 11 aa, HUMAN IMMUNODEFICIENCY VIRUS
MLTQIGCTLNF

SEQ ID NO: 9739 - protein, 11 aa, HUMAN IMMUNODEFICIENCY VIRUS
WTVQPIQLPEK

SEQ ID NO: 9740 - protein, 11 aa, HUMAN IMMUNODEFICIENCY VIRUS
IVIWGKTPKFK

SEQ ID NO: 9741 - protein, 11 aa, HUMAN IMMUNODEFICIENCY VIRUS
ETTNQKTELQA

SEQ ID NO: 9742 - protein, 9 aa, HUMAN IMMUNODEFICIENCY VIRUS
KDFRKYTAF

SEQ ID NO: 9743 - protein, 10 aa, HUMAN IMMUNODEFICIENCY VIRUS
YFSVPLDKDF

SEQ ID NO: 9744 - protein, 11 aa, HUMAN IMMUNODEFICIENCY VIRUS
YFSVPLDKDFR

SEQ ID NO: 9745 - protein, 11 aa, HUMAN IMMUNODEFICIENCY VIRUS
NLKTGKYAKMR

SEQ ID NO: 9746 - protein, 8 aa, HUMAN IMMUNODEFICIENCY VIRUS
SVPLDKDF

SEQ ID NO: 9747 - protein, 8 aa, HUMAN IMMUNODEFICIENCY VIRUS
PDIVIYQY

SEQ ID NO: 9748 - protein, 9 aa, HUMAN IMMUNODEFICIENCY VIRUS
FSVPLDKDF

SEQ ID NO: 9749 - protein, 9 aa, HUMAN IMMUNODEFICIENCY VIRUS
SVPLDKDFR

SEQ ID NO: 9750 - protein, 10 aa, HUMAN IMMUNODEFICIENCY VIRUS
FSVPLDKDFR

SEQ ID NO: 9751 - protein, 10 aa, HUMAN IMMUNODEFICIENCY VIRUS
SVPLDKDFRK

SEQ ID NO: 9752 - protein, 10 aa, HUMAN IMMUNODEFICIENCY VIRUS
AGIKVKQLCK

SEQ ID NO: 9753 - protein, 11 aa, HUMAN IMMUNODEFICIENCY VIRUS
FSVPLDKDFRK

SEQ ID NO: 9754 - protein, 11 aa, HUMAN IMMUNODEFICIENCY VIRUS
SVPLDKDFRKY

SEQ ID NO: 9755 - protein, 11 aa, HUMAN IMMUNODEFICIENCY VIRUS
LDKDFRKYTAF

SEQ ID NO: 9756 - protein, 11 aa, HUMAN IMMUNODEFICIENCY VIRUS
YAGIKVKQLCK

SEQ ID NO: 9757 - protein, 11 aa, HUMAN IMMUNODEFICIENCY VIRUS
LVSQIIEQLIK

SEQ ID NO: 9758 - protein, 8 aa, HUMAN IMMUNODEFICIENCY VIRUS
PLDKDFRK

SEQ ID NO: 9759 - protein, 8 aa, HUMAN IMMUNODEFICIENCY VIRUS
KDFRKYTA

SEQ ID NO: 9760 - protein, 9 aa, HUMAN IMMUNODEFICIENCY VIRUS
PLDKDFRKY

SEQ ID NO: 9761 - protein, 9 aa, HUMAN IMMUNODEFICIENCY VIRUS
KTGKYAKMR

SEQ ID NO: 9762 - protein, 11 aa, HUMAN IMMUNODEFICIENCY VIRUS
PLDKDFRKYTA

SEQ ID NO: 9763 - protein, 8 aa, HUMAN IMMUNODEFICIENCY VIRUS
LDKDFRKY

SEQ ID NO: 9764 - protein, 8 aa, HUMAN IMMUNODEFICIENCY VIRUS
KIEELREH

SEQ ID NO: 9765 - protein, 8 aa, HUMAN IMMUNODEFICIENCY VIRUS
TGKYAKMR

SEQ ID NO: 9766 - protein, 8 aa, HUMAN IMMUNODEFICIENCY VIRUS
GAHTNDVK

SEQ ID NO: 9767 - protein, 8 aa, HUMAN IMMUNODEFICIENCY VIRUS
LTDTTNQK

SEQ ID NO: 9768 - protein, 8 aa, HUMAN IMMUNODEFICIENCY VIRUS
PLWKGPAK

SEQ ID NO: 9769 - protein, 9 aa, HUMAN IMMUNODEFICIENCY VIRUS
GIKVRQLCK

SEQ ID NO: 9770 - protein, 9 aa, HUMAN IMMUNODEFICIENCY VIRUS
RGAHTNDVK

SEQ ID NO: 9771 - protein, 10 aa, HUMAN IMMUNODEFICIENCY VIRUS
LDKDFRKYTA

SEQ ID NO: 9772 - protein, 10 aa, HUMAN IMMUNODEFICIENCY VIRUS
KVRQLCKLLR

SEQ ID NO: 9773 - protein, 10 aa, HUMAN IMMUNODEFICIENCY VIRUS
ATESIVIWGK

SEQ ID NO: 9774 - protein, 10 aa, HUMAN IMMUNODEFICIENCY VIRUS
VSQIIEQLIK

SEQ ID NO: 9775 - protein, 10 aa, HUMAN IMMUNODEFICIENCY VIRUS
MAGDDCVASR

SEQ ID NO: 9776 - protein, 11 aa, HUMAN IMMUNODEFICIENCY VIRUS
VSQIIEQLIKK

SEQ ID NO: 9777 - protein, 11 aa, HUMAN IMMUNODEFICIENCY VIRUS
QLIKKEKVYLA

SEQ ID NO: 9778 - protein, 11 aa, HUMAN IMMUNODEFICIENCY VIRUS
QMAGDDCVASR

SEQ ID NO: 9779 - protein, 9 aa, HUMAN IMMUNODEFICIENCY VIRUS
QIYAGIKVK

SEQ ID NO: 9780 - protein, 9 aa, HUMAN IMMUNODEFICIENCY VIRUS
KVYLAWVPA

SEQ ID NO: 9781 - protein, 10 aa, HUMAN IMMUNODEFICIENCY VIRUS
KVYLAWVPAH

SEQ ID NO: 9782 - protein, 10 aa, HUMAN IMMUNODEFICIENCY VIRUS
KAACWWAGIK

SEQ ID NO: 9783 - protein, 11 aa, HUMAN IMMUNODEFICIENCY VIRUS
ASQIYAGIKVK

SEQ ID NO: 9784 - protein, 11 aa, HUMAN IMMUNODEFICIENCY VIRUS
KVYLAWVPAHK

SEQ ID NO: 9785 - protein, 8 aa, HUMAN IMMUNODEFICIENCY VIRUS
KFKLPIQK

SEQ ID NO: 9786 - protein, 8 aa, HUMAN IMMUNODEFICIENCY VIRUS
GDDCVASR

SEQ ID NO: 9787 - protein, 9 aa, HUMAN IMMUNODEFICIENCY VIRUS
AGDDCVASR

SEQ ID NO: 9788 - protein, 10 aa, HUMAN IMMUNODEFICIENCY VIRUS
VSLTETTNQK

SEQ ID NO: 9789 - protein, 10 aa, HUMAN IMMUNODEFICIENCY VIRUS
LIKKEKVYLA

SEQ ID NO: 9790 - protein, 11 aa, HUMAN IMMUNODEFICIENCY VIRUS
LLKLAGRWPVK

SEQ ID NO: 9791 - protein, 8 aa, HUMAN IMMUNODEFICIENCY VIRUS
YFSVPLDK

SEQ ID NO: 9792 - protein, 11 aa, HUMAN IMMUNODEFICIENCY VIRUS
KVIHTDNGSNF

SEQ ID NO: 9793 - protein, 8 aa, HUMAN IMMUNODEFICIENCY VIRUS
ACWWAGIK

SEQ ID NO: 9794 - protein, 8 aa, HUMAN IMMUNODEFICIENCY VIRUS
WAGIKQEF

SEQ ID NO: 9795 - protein, 9 aa, HUMAN IMMUNODEFICIENCY VIRUS
SLTETTNQK

SEQ ID NO: 9796 - protein, 9 aa, HUMAN IMMUNODEFICIENCY VIRUS
AACWWAGIK

SEQ ID NO: 9797 - protein, 10 aa, HUMAN IMMUNODEFICIENCY VIRUS
DAYFSVPLDK

SEQ ID NO: 9798 - protein, 10 aa, HUMAN IMMUNODEFICIENCY VIRUS
DLEIGQHRTK

SEQ ID NO: 9799 - protein, 10 aa, HUMAN IMMUNODEFICIENCY VIRUS
QLCKLLRGTK

SEQ ID NO: 9800 - protein, 10 aa, HUMAN IMMUNODEFICIENCY VIRUS
SDFNLPPIVA

SEQ ID NO: 9801 - protein, 11 aa, HUMAN IMMUNODEFICIENCY VIRUS
LLTQIGCTLNF

SEQ ID NO: 9802 - protein, 11 aa, HUMAN IMMUNODEFICIENCY VIRUS
IFAIKKKDSTK

SEQ ID NO: 9803 - protein, 11 aa, HUMAN IMMUNODEFICIENCY VIRUS
GDAYFSVPLDK

SEQ ID NO: 9804 - protein, 11 aa, HUMAN IMMUNODEFICIENCY VIRUS
SDLEIGQHRTK

SEQ ID NO: 9805 - protein, 11 aa, HUMAN IMMUNODEFICIENCY VIRUS
QLCKLLRGTKA

SEQ ID NO: 9806 - protein, 11 aa, HUMAN IMMUNODEFICIENCY VIRUS
ASDFNLPPIVA

SEQ ID NO: 9807 - protein, 11 aa, HUMAN IMMUNODEFICIENCY VIRUS
SDFNLPPIVAK

SEQ ID NO: 9808 - protein, 11 aa, HUMAN IMMUNODEFICIENCY VIRUS
ACWWAGIKQEF

SEQ ID NO: 9809 - protein, 11 aa, HUMAN IMMUNODEFICIENCY VIRUS
AGIKQEFGIPY

SEQ ID NO: 9810 - protein, 8 aa, HUMAN IMMUNODEFICIENCY VIRUS
EDFRKYTA

SEQ ID NO: 9811 - protein, 9 aa, HUMAN IMMUNODEFICIENCY VIRUS
EDFRKYTAF

SEQ ID NO: 9812 - protein, 8 aa, HUMAN IMMUNODEFICIENCY VIRUS
EIGQHRTK

SEQ ID NO: 9813 - protein, 8 aa, HUMAN IMMUNODEFICIENCY VIRUS
RTKIEELR

SEQ ID NO: 9814 - protein, 8 aa, HUMAN IMMUNODEFICIENCY VIRUS
YLAWVPAH

SEQ ID NO: 9815 - protein, 8 aa, HUMAN IMMUNODEFICIENCY VIRUS
LAWVPAHK

SEQ ID NO: 9816 - protein, 9 aa, HUMAN IMMUNODEFICIENCY VIRUS
YLAWVPAHK

SEQ ID NO: 9817 - protein, 10 aa, HUMAN IMMUNODEFICIENCY VIRUS
NFPQITLWQR

SEQ ID NO: 9818 - protein, 10 aa, HUMAN IMMUNODEFICIENCY VIRUS
MTKILEPFRK

SEQ ID NO: 9819 - protein, 10 aa, HUMAN IMMUNODEFICIENCY VIRUS
KVILVAVHVA

SEQ ID NO: 9820 - protein, 10 aa, HUMAN IMMUNODEFICIENCY VIRUS
AGRWPVKVIH

SEQ ID NO: 9821 - protein, 10 aa, HUMAN IMMUNODEFICIENCY VIRUS
GIKQEFGIPY

SEQ ID NO: 9822 - protein, 11 aa, HUMAN IMMUNODEFICIENCY VIRUS
SMTKILEPFRK

SEQ ID NO: 9823 - protein, 11 aa, HUMAN IMMUNODEFICIENCY VIRUS
KTPKFRLPIQK

SEQ ID NO: 9824 - protein, 11 aa, HUMAN IMMUNODEFICIENCY VIRUS
LAGRWPVKVIH

SEQ ID NO: 9825 - protein, 9 aa, HUMAN IMMUNODEFICIENCY VIRUS
KVYLSWVPA

SEQ ID NO: 9826 - protein, 10 aa, HUMAN IMMUNODEFICIENCY VIRUS
KVYLSWVPAH

SEQ ID NO: 9827 - protein, 11 aa, HUMAN IMMUNODEFICIENCY VIRUS
KVYLSWVPAHK

SEQ ID NO: 9828 - protein, 8 aa, HUMAN IMMUNODEFICIENCY VIRUS
KILEPFRK

SEQ ID NO: 9829 - protein, 8 aa, HUMAN IMMUNODEFICIENCY VIRUS
EGKVILVA

SEQ ID NO: 9830 - protein, 8 aa, HUMAN IMMUNODEFICIENCY VIRUS
KVILVAVH

SEQ ID NO: 9831 - protein, 9 aa, HUMAN IMMUNODEFICIENCY VIRUS
KIGGQLKEA

SEQ ID NO: 9832 - protein, 9 aa, HUMAN IMMUNODEFICIENCY VIRUS
DFNLPPIVA

SEQ ID NO: 9833 - protein, 9 aa, HUMAN IMMUNODEFICIENCY VIRUS
VILVAVHVA

SEQ ID NO: 9834 - protein, 9 aa, HUMAN IMMUNODEFICIENCY VIRUS
TVKAACWWA

SEQ ID NO: 9835 - protein, 10 aa, HUMAN IMMUNODEFICIENCY VIRUS
SFPQITLWQR

SEQ ID NO: 9836 - protein, 10 aa, HUMAN IMMUNODEFICIENCY VIRUS
DFNLPPIVAK

SEQ ID NO: 9837 - protein, 10 aa, HUMAN IMMUNODEFICIENCY VIRUS
HLEGKVILVA

SEQ ID NO: 9838 - protein, 10 aa, HUMAN IMMUNODEFICIENCY VIRUS
EGKVILVAVH

SEQ ID NO: 9839 - protein, 11 aa, HUMAN IMMUNODEFICIENCY VIRUS
LLKWGFTTPDK

SEQ ID NO: 9840 - protein, 11 aa, HUMAN IMMUNODEFICIENCY VIRUS
LLRWGFTTPDK

SEQ ID NO: 9841 - protein, 11 aa, HUMAN IMMUNODEFICIENCY VIRUS
IDIIATDIQTK

SEQ ID NO: 9842 - protein, 8 aa, HUMAN IMMUNODEFICIENCY VIRUS
KLLRGTKA

SEQ ID NO: 9843 - protein, 8 aa, HUMAN IMMUNODEFICIENCY VIRUS
NTPIFAIK

SEQ ID NO: 9844 - protein, 8 aa, HUMAN IMMUNODEFICIENCY VIRUS
GDDCVAGR

SEQ ID NO: 9845 - protein, 9 aa, HUMAN IMMUNODEFICIENCY VIRUS
NTPIFAIKK

SEQ ID NO: 9846 - protein, 9 aa, HUMAN IMMUNODEFICIENCY VIRUS
LCKLLRGTK

SEQ ID NO: 9847 - protein, 9 aa, HUMAN IMMUNODEFICIENCY VIRUS
AGDDCVAGR

SEQ ID NO: 9848 - protein, 10 aa, HUMAN IMMUNODEFICIENCY VIRUS
NTPIFAIKKK

SEQ ID NO: 9849 - protein, 10 aa, HUMAN IMMUNODEFICIENCY VIRUS
LCKLLRGTKA

SEQ ID NO: 9850 - protein, 10 aa, HUMAN IMMUNODEFICIENCY VIRUS
VIHTDNGSNF

SEQ ID NO: 9851 - protein, 10 aa, HUMAN IMMUNODEFICIENCY VIRUS
MAGDDCVAGR

SEQ ID NO: 9852 - protein, 11 aa, HUMAN IMMUNODEFICIENCY VIRUS
QLCKLLRGAKA

SEQ ID NO: 9853 - protein, 11 aa, HUMAN IMMUNODEFICIENCY VIRUS
QGQGQWTYQIY

SEQ ID NO: 9854 - protein, 11 aa, HUMAN IMMUNODEFICIENCY VIRUS
KLGKAGYVTDR

SEQ ID NO: 9855 - protein, 11 aa, HUMAN IMMUNODEFICIENCY VIRUS
TAYFLLKLAGR

SEQ ID NO: 9856 - protein, 11 aa, HUMAN IMMUNODEFICIENCY VIRUS
QMAGDDCVAGR

SEQ ID NO: 9857 - protein, 8 aa, HUMAN IMMUNODEFICIENCY VIRUS
KLLRGAKA

SEQ ID NO: 9858 - protein, 9 aa, HUMAN IMMUNODEFICIENCY VIRUS
QGQWTYQIY

SEQ ID NO: 9859 - protein, 8 aa, HUMAN IMMUNODEFICIENCY VIRUS
IGGQLKEA

SEQ ID NO: 9860 - protein, 8 aa, HUMAN IMMUNODEFICIENCY VIRUS
PIFAIKKK

SEQ ID NO: 9861 - protein, 8 aa, HUMAN IMMUNODEFICIENCY VIRUS
QGQGQWTY

SEQ ID NO: 9862 - protein, 8 aa, HUMAN IMMUNODEFICIENCY VIRUS
FLLKLAGR

SEQ ID NO: 9863 - protein, 9 aa, HUMAN IMMUNODEFICIENCY VIRUS
QLCKLLRGA

SEQ ID NO: 9864 - protein, 9 aa, HUMAN IMMUNODEFICIENCY VIRUS
PIVAKEIVA

SEQ ID NO: 9865 - protein, 9 aa, HUMAN IMMUNODEFICIENCY VIRUS
YFLLKLAGR

SEQ ID NO: 9866 - protein, 10 aa, HUMAN IMMUNODEFICIENCY VIRUS
QLCKLLRGAK

SEQ ID NO: 9867 - protein, 10 aa, HUMAN IMMUNODEFICIENCY VIRUS
LCKLLRGAKA

SEQ ID NO: 9868 - protein, 10 aa, HUMAN IMMUNODEFICIENCY VIRUS
LGKAGYVTDR

SEQ ID NO: 9869 - protein, 10 aa, HUMAN IMMUNODEFICIENCY VIRUS
IDKAQEEHEK

SEQ ID NO: 9870 - protein, 10 aa, HUMAN IMMUNODEFICIENCY VIRUS
SDFNLPPVVA

SEQ ID NO: 9871 - protein, 11 aa, HUMAN IMMUNODEFICIENCY VIRUS
PSKDLIAEIQK

SEQ ID NO: 9872 - protein, 11 aa, HUMAN IMMUNODEFICIENCY VIRUS
DTTNQKTELQA

SEQ ID NO: 9873 - protein, 11 aa, HUMAN IMMUNODEFICIENCY VIRUS
GIDKAQEEHEK

SEQ ID NO: 9874 - protein, 11 aa, HUMAN IMMUNODEFICIENCY VIRUS
IDKAQEEHEKY

SEQ ID NO: 9875 - protein, 11 aa, HUMAN IMMUNODEFICIENCY VIRUS
ASDFNLPPVVA

SEQ ID NO: 9876 - protein, 11 aa, HUMAN IMMUNODEFICIENCY VIRUS
SDFNLPPVVAK

SEQ ID NO: 9877 - protein, 8 aa, HUMAN IMMUNODEFICIENCY VIRUS
RAKIEELR

SEQ ID NO: 9878 - protein, 8 aa, HUMAN IMMUNODEFICIENCY VIRUS
LCKLLRGA

SEQ ID NO: 9879 - protein, 8 aa, HUMAN IMMUNODEFICIENCY VIRUS
KFRLPIQK

SEQ ID NO: 9880 - protein, 8 aa, HUMAN IMMUNODEFICIENCY VIRUS
NLPPIVAK

SEQ ID NO: 9881 - protein, 8 aa, HUMAN IMMUNODEFICIENCY VIRUS
IVAKEIVA

SEQ ID NO: 9882 - protein, 9 aa, HUMAN IMMUNODEFICIENCY VIRUS
LCKLLRGAK

SEQ ID NO: 9883 - protein, 9 aa, HUMAN IMMUNODEFICIENCY VIRUS
LTEAVQKIA

SEQ ID NO: 9884 - protein, 9 aa, HUMAN IMMUNODEFICIENCY VIRUS
SSGIRKVLF

SEQ ID NO: 9885 - protein, 9 aa, HUMAN IMMUNODEFICIENCY VIRUS
DFNLPPVVA

SEQ ID NO: 9886 - protein, 10 aa, HUMAN IMMUNODEFICIENCY VIRUS
QLTEAVQKIA

SEQ ID NO: 9887 - protein, 10 aa, HUMAN IMMUNODEFICIENCY VIRUS
VSSGIRKVLF

SEQ ID NO: 9888 - protein, 10 aa, HUMAN IMMUNODEFICIENCY VIRUS
DFNLPPVVAK

SEQ ID NO: 9889 - protein, 10 aa, HUMAN IMMUNODEFICIENCY VIRUS
GSNFTSAAVK

SEQ ID NO: 9890 - protein, 11 aa, HUMAN IMMUNODEFICIENCY VIRUS
LVSSGIRKVLF

SEQ ID NO: 9891 - protein, 11 aa, HUMAN IMMUNODEFICIENCY VIRUS
TGQETAYFLLK

SEQ ID NO: 9892 - protein, 11 aa, HUMAN IMMUNODEFICIENCY VIRUS
NGSNFTSAAVK

SEQ ID NO: 9893 - protein, 11 aa, HUMAN IMMUNODEFICIENCY VIRUS
GSNFTSAAVKA

SEQ ID NO: 9894 - protein, 8 aa, HUMAN IMMUNODEFICIENCY VIRUS
KAQEEHEK

SEQ ID NO: 9895 - protein, 9 aa, HUMAN IMMUNODEFICIENCY VIRUS
ASQIYAGIK

SEQ ID NO: 9896 - protein, 9 aa, HUMAN IMMUNODEFICIENCY VIRUS
KAQEEHEKY

SEQ ID NO: 9897 - protein, 10 aa, HUMAN IMMUNODEFICIENCY VIRUS
KAQEEHEKYH

SEQ ID NO: 9898 - protein, 8 aa, HUMAN IMMUNODEFICIENCY VIRUS
EICTEMEK

SEQ ID NO: 9899 - protein, 8 aa, HUMAN IMMUNODEFICIENCY VIRUS
EIGQHRAK

SEQ ID NO: 9900 - protein, 8 aa, HUMAN IMMUNODEFICIENCY VIRUS
LVSSGIRK

SEQ ID NO: 9901 - protein, 8 aa, HUMAN IMMUNODEFICIENCY VIRUS
SGIRKVLF

SEQ ID NO: 9902 - protein, 8 aa, HUMAN IMMUNODEFICIENCY VIRUS
NLPPVVAK

SEQ ID NO: 9903 - protein, 8 aa, HUMAN IMMUNODEFICIENCY VIRUS
ETAYFLLK

SEQ ID NO: 9904 - protein, 8 aa, HUMAN IMMUNODEFICIENCY VIRUS
TSAAVKAA

SEQ ID NO: 9905 - protein, 9 aa, HUMAN IMMUNODEFICIENCY VIRUS
KLVSSGIRK

SEQ ID NO: 9906 - protein, 9 aa, HUMAN IMMUNODEFICIENCY VIRUS
TAYFLLKLA

SEQ ID NO: 9907 - protein, 9 aa, HUMAN IMMUNODEFICIENCY VIRUS
FTSAAVKAA

SEQ ID NO: 9908 - protein, 10 aa, HUMAN IMMUNODEFICIENCY VIRUS
DLEIGQHRAK

SEQ ID NO: 9909 - protein, 10 aa, HUMAN IMMUNODEFICIENCY VIRUS
KLNWASQIYA

SEQ ID NO: 9910 - protein, 10 aa, HUMAN IMMUNODEFICIENCY VIRUS
WASQIYAGIK

SEQ ID NO: 9911 - protein, 10 aa, HUMAN IMMUNODEFICIENCY VIRUS
KVKQLCKLLR

SEQ ID NO: 9912 - protein, 10 aa, HUMAN IMMUNODEFICIENCY VIRUS
ETAYFLLKLA

SEQ ID NO: 9913 - protein, 10 aa, HUMAN IMMUNODEFICIENCY VIRUS
NFTSAAVKAA

SEQ ID NO: 9914 - protein, 11 aa, HUMAN IMMUNODEFICIENCY VIRUS
EICTEMEKEGK

SEQ ID NO: 9915 - protein, 11 aa, HUMAN IMMUNODEFICIENCY VIRUS
SDLEIGQHRAK

SEQ ID NO: 9916 - protein, 11 aa, HUMAN IMMUNODEFICIENCY VIRUS
VDKLVSSGIRK

SEQ ID NO: 9917 - protein, 9 aa, HUMAN IMMUNODEFICIENCY VIRUS
ASQIYPGIK

SEQ ID NO: 9918 - protein, 9 aa, HUMAN IMMUNODEFICIENCY VIRUS
KDLIAEIQK

SEQ ID NO: 9919 - protein, 9 aa, HUMAN IMMUNODEFICIENCY VIRUS
NLKTGKYAK

SEQ ID NO: 9920 - protein, 8 aa, HUMAN IMMUNODEFICIENCY VIRUS
DLIAEIQK

SEQ ID NO: 9921 - protein, 8 aa, HUMAN IMMUNODEFICIENCY VIRUS
PIVGAETF

SEQ ID NO: 9922 - protein, 8 aa, HUMAN IMMUNODEFICIENCY VIRUS
IVGAETFY

SEQ ID NO: 9923 - protein, 8 aa, HUMAN IMMUNODEFICIENCY VIRUS
GSNFTSAA

SEQ ID NO: 9924 - protein, 8 aa, HUMAN IMMUNODEFICIENCY VIRUS
NFTSAAVK

SEQ ID NO: 9925 - protein, 8 aa, HUMAN IMMUNODEFICIENCY VIRUS
FTSAAVKA

SEQ ID NO: 9926 - protein, 9 aa, HUMAN IMMUNODEFICIENCY VIRUS
CTEMEKEGK

SEQ ID NO: 9927 - protein, 9 aa, HUMAN IMMUNODEFICIENCY VIRUS
DLEIGQHRA

SEQ ID NO: 9928 - protein, 9 aa, HUMAN IMMUNODEFICIENCY VIRUS
GIKVKQLCK

SEQ ID NO: 9929 - protein, 9 aa, HUMAN IMMUNODEFICIENCY VIRUS
PIVGAETFY

SEQ ID NO: 9930 - protein, 9 aa, HUMAN IMMUNODEFICIENCY VIRUS
QLIKKEKVY

SEQ ID NO: 9931 - protein, 9 aa, HUMAN IMMUNODEFICIENCY VIRUS
PVVAKEIVA

SEQ ID NO: 9932 - protein, 9 aa, HUMAN IMMUNODEFICIENCY VIRUS
NGSNFTSAA

SEQ ID NO: 9933 - protein, 9 aa, HUMAN IMMUNODEFICIENCY VIRUS
NFTSAAVKA

SEQ ID NO: 9934 - protein, 10 aa, HUMAN IMMUNODEFICIENCY VIRUS
ICTEMEKEGK

SEQ ID NO: 9935 - protein, 10 aa, HUMAN IMMUNODEFICIENCY VIRUS
SDLEIGQHRA

SEQ ID NO: 9936 - protein, 10 aa, HUMAN IMMUNODEFICIENCY VIRUS
WASQIYPGIK

SEQ ID NO: 9937 - protein, 10 aa, HUMAN IMMUNODEFICIENCY VIRUS
AAVKAACWWA

SEQ ID NO: 9938 - protein, 11 aa, HUMAN IMMUNODEFICIENCY VIRUS
GSDLEIGQHRA

SEQ ID NO: 9939 - protein, 11 aa, HUMAN IMMUNODEFICIENCY VIRUS
VGAETFYVDGA

SEQ ID NO: 9940 - protein, 11 aa, HUMAN IMMUNODEFICIENCY VIRUS
TDNGSNFTSAA

SEQ ID NO: 9941 - protein, 11 aa, HUMAN IMMUNODEFICIENCY VIRUS
SAAVKAACWWA

SEQ ID NO: 9942 - protein, 9 aa, HUMAN IMMUNODEFICIENCY VIRUS
NLKTGKYAR

SEQ ID NO: 9943 - protein, 8 aa, HUMAN IMMUNODEFICIENCY VIRUS
KLVSSGIR

SEQ ID NO: 9944 - protein, 10 aa, HUMAN IMMUNODEFICIENCY VIRUS
VIWGKTPKFR

SEQ ID NO: 9945 - protein, 10 aa, HUMAN IMMUNODEFICIENCY VIRUS
VDKLVSSGIR

SEQ ID NO: 9946 - protein, 11 aa, HUMAN IMMUNODEFICIENCY VIRUS
PLTEEAELELA

SEQ ID NO: 9947 - protein, 11 aa, HUMAN IMMUNODEFICIENCY VIRUS
IVIWGKTPKFR

SEQ ID NO: 9948 - protein, 11 aa, HUMAN IMMUNODEFICIENCY VIRUS
QVDKLVSSGIR

SEQ ID NO: 9949 - protein, 8 aa, HUMAN IMMUNODEFICIENCY VIRUS
WGKTPKFR

SEQ ID NO: 9950 - protein, 8 aa, HUMAN IMMUNODEFICIENCY VIRUS
LTETTNQK

SEQ ID NO: 9951 - protein, 9 aa, HUMAN IMMUNODEFICIENCY VIRUS
IILVAVHVA

SEQ ID NO: 9952 - protein, 10 aa, HUMAN IMMUNODEFICIENCY VIRUS
AANRETKLGK

SEQ ID NO: 9953 - protein, 10 aa, HUMAN IMMUNODEFICIENCY VIRUS
IIEQLIKKEK

SEQ ID NO: 9954 - protein, 10 aa, HUMAN IMMUNODEFICIENCY VIRUS
KIILVAVHVA

SEQ ID NO: 9955 - protein, 11 aa, HUMAN IMMUNODEFICIENCY VIRUS
GAANRETKLGK

SEQ ID NO: 9956 - protein, 11 aa, HUMAN IMMUNODEFICIENCY VIRUS
AANRETKLGKA

SEQ ID NO: 9957 - protein, 11 aa, HUMAN IMMUNODEFICIENCY VIRUS
QIIEQLIKKEK

SEQ ID NO: 9958 - protein, 11 aa, HUMAN IMMUNODEFICIENCY VIRUS
ILKLAGRWPVK

SEQ ID NO: 9959 - protein, 8 aa, HUMAN IMMUNODEFICIENCY VIRUS
VVAKEIVA

SEQ ID NO: 9960 - protein, 8 aa, HUMAN IMMUNODEFICIENCY VIRUS
EGKIILVA

SEQ ID NO: 9961 - protein, 8 aa, HUMAN IMMUNODEFICIENCY VIRUS
KIILVAVH

SEQ ID NO: 9962 - protein, 8 aa, HUMAN IMMUNODEFICIENCY VIRUS
ETAYFILK

SEQ ID NO: 9963 - protein, 9 aa, HUMAN IMMUNODEFICIENCY VIRUS
YFILKLAGR

SEQ ID NO: 9964 - protein, 10 aa, HUMAN IMMUNODEFICIENCY VIRUS
HLEGKIILVA

SEQ ID NO: 9965 - protein, 10 aa, HUMAN IMMUNODEFICIENCY VIRUS
EGKIILVAVH

SEQ ID NO: 9966 - protein, 10 aa, HUMAN IMMUNODEFICIENCY VIRUS
ETAYFILKLA

SEQ ID NO: 9967 - protein, 11 aa, HUMAN IMMUNODEFICIENCY VIRUS
PSINNETPGIR

SEQ ID NO: 9968 - protein, 11 aa, HUMAN IMMUNODEFICIENCY VIRUS
TGQETAYFILK

SEQ ID NO: 9969 - protein, 11 aa, HUMAN IMMUNODEFICIENCY VIRUS
TAYFILKLAGR

SEQ ID NO: 9970 - protein, 8 aa, HUMAN IMMUNODEFICIENCY VIRUS
FILKLAGR

SEQ ID NO: 9971 - protein, 9 aa, HUMAN IMMUNODEFICIENCY VIRUS
NDVKQLTEA

SEQ ID NO: 9972 - protein, 9 aa, HUMAN IMMUNODEFICIENCY VIRUS
TAYFILKLA

SEQ ID NO: 9973 - protein, 9 aa, HUMAN IMMUNODEFICIENCY VIRUS
AVKAACWWA

SEQ ID NO: 9974 - protein, 10 aa, HUMAN IMMUNODEFICIENCY VIRUS
SINNETPGIR

SEQ ID NO: 9975 - protein, 11 aa, HUMAN IMMUNODEFICIENCY VIRUS
SINNETPGIRY

SEQ ID NO: 9976 - protein, 11 aa, HUMAN IMMUNODEFICIENCY VIRUS
SSMTKILEPFR

SEQ ID NO: 9977 - protein, 11 aa, HUMAN IMMUNODEFICIENCY VIRUS
HTNDVKQLTEA

SEQ ID NO: 9978 - protein, 11 aa, HUMAN IMMUNODEFICIENCY VIRUS
HSNWRAMASDF

SEQ ID NO: 9979 - protein, 11 aa, HUMAN IMMUNODEFICIENCY VIRUS
QTKELQKQITK

SEQ ID NO: 9980 - protein, 8 aa, HUMAN IMMUNODEFICIENCY VIRUS
DVKQLTEA

SEQ ID NO: 9981 - protein, 8 aa, HUMAN IMMUNODEFICIENCY VIRUS
NGSNFTSA

SEQ ID NO: 9982 - protein, 10 aa, HUMAN IMMUNODEFICIENCY VIRUS
EMEKEGKISK

SEQ ID NO: 9983 - protein, 10 aa, HUMAN IMMUNODEFICIENCY VIRUS
SSMTKILEPF

SEQ ID NO: 9984 - protein, 10 aa, HUMAN IMMUNODEFICIENCY VIRUS
TDNGSNFTSA

SEQ ID NO: 9985 - protein, 11 aa, HUMAN IMMUNODEFICIENCY VIRUS
QSSMTKILEPF

SEQ ID NO: 9986 - protein, 11 aa, HUMAN IMMUNODEFICIENCY VIRUS
DVKQLTEAVQK

SEQ ID NO: 9987 - protein, 11 aa, HUMAN IMMUNODEFICIENCY VIRUS
HTDNGSNFTSA

SEQ ID NO: 9988 - protein, 9 aa, HUMAN IMMUNODEFICIENCY VIRUS
YDPSKDLIA

SEQ ID NO: 9989 - protein, 10 aa, HUMAN IMMUNODEFICIENCY VIRUS
DIIATDIQTK

SEQ ID NO: 9990 - protein, 11 aa, HUMAN IMMUNODEFICIENCY VIRUS
QLKEALLDTGA

SEQ ID NO: 9991 - protein, 8 aa, HUMAN IMMUNODEFICIENCY VIRUS
ELQKQITK

SEQ ID NO: 9992 - protein, 8 aa, HUMAN IMMUNODEFICIENCY VIRUS
LIKKEKVY

SEQ ID NO: 9993 - protein, 8 aa, HUMAN IMMUNODEFICIENCY VIRUS
QITKIQNF

SEQ ID NO: 9994 - protein, 8 aa, HUMAN IMMUNODEFICIENCY VIRUS
DSRDPIWK

SEQ ID NO: 9995 - protein, 9 aa, HUMAN IMMUNODEFICIENCY VIRUS
ETKLGKAGY

SEQ ID NO: 9996 - protein, 9 aa, HUMAN IMMUNODEFICIENCY VIRUS
IIATDIQTK

SEQ ID NO: 9997 - protein, 9 aa, HUMAN IMMUNODEFICIENCY VIRUS
QITKIQNFR

SEQ ID NO: 9998 - protein, 9 aa, HUMAN IMMUNODEFICIENCY VIRUS
RDSRDPIWK

SEQ ID NO: 9999 - protein, 10 aa, HUMAN IMMUNODEFICIENCY VIRUS
TDIQTKELQK

SEQ ID NO: 10000 - protein, 10 aa, HUMAN IMMUNODEFICIENCY VIRUS
RDPIWKGPAK

SEQ ID NO: 10001 - protein, 11 aa, HUMAN IMMUNODEFICIENCY VIRUS
ATDIQTKELQK

SEQ ID NO: 10002 - protein, 11 aa, HUMAN IMMUNODEFICIENCY VIRUS
QITKIQNFRVY

SEQ ID NO: 10003 - protein, 11 aa, HUMAN IMMUNODEFICIENCY VIRUS
DSRDPIWKGPA

SEQ ID NO: 10004 - protein, 11 aa, HUMAN IMMUNODEFICIENCY VIRUS
SDIKVVPRRKA

SEQ ID NO: 10005 - protein, 8 aa, HUMAN IMMUNODEFICIENCY VIRUS
ITKIQNFR

SEQ ID NO: 10006 - protein, 10 aa, HUMAN IMMUNODEFICIENCY VIRUS
ITKIQNFRVY

SEQ ID NO: 10007 - protein, 11 aa, HUMAN IMMUNODEFICIENCY VIRUS
ITKIQNFRVYY

SEQ ID NO: 10008 - protein, 8 aa, HUMAN IMMUNODEFICIENCY VIRUS
IATDIQTK

SEQ ID NO: 10009 - protein, 8 aa, HUMAN IMMUNODEFICIENCY VIRUS
PIWKGPAK

SEQ ID NO: 10010 - protein, 9 aa, HUMAN IMMUNODEFICIENCY VIRUS
NLPGKWKPK

SEQ ID NO: 10011 - protein, 9 aa, HUMAN IMMUNODEFICIENCY VIRUS
AIFQSSMTK

SEQ ID NO: 10012 - protein, 10 aa, HUMAN IMMUNODEFICIENCY VIRUS
PAIFQSSMTK

SEQ ID NO: 10013 - protein, 10 aa, HUMAN IMMUNODEFICIENCY VIRUS
LTEEAELELA

SEQ ID NO: 10014 - protein, 11 aa, HUMAN IMMUNODEFICIENCY VIRUS
VFAIKKKDSTK

SEQ ID NO: 10015 - protein, 8 aa, HUMAN IMMUNODEFICIENCY VIRUS
NTPVFAIK

SEQ ID NO: 10016 - protein, 8 aa, HUMAN IMMUNODEFICIENCY VIRUS
PVFAIKKK

SEQ ID NO: 10017 - protein, 8 aa, HUMAN IMMUNODEFICIENCY VIRUS
QLTEAVQK

SEQ ID NO: 10018 - protein, 8 aa, HUMAN IMMUNODEFICIENCY VIRUS
QIIEQLIK

SEQ ID NO: 10019 - protein, 8 aa, HUMAN IMMUNODEFICIENCY VIRUS
IIEQLIKK

SEQ ID NO: 10020 - protein, 8 aa, HUMAN IMMUNODEFICIENCY VIRUS
YLSWVPAH

SEQ ID NO: 10021 - protein, 8 aa, HUMAN IMMUNODEFICIENCY VIRUS
LSWVPAHK

SEQ ID NO: 10022 - protein, 9 aa, HUMAN IMMUNODEFICIENCY VIRUS
NTPVFAIKK

SEQ ID NO: 10023 - protein, 9 aa, HUMAN IMMUNODEFICIENCY VIRUS
QIIEQLIKK

SEQ ID NO: 10024 - protein, 9 aa, HUMAN IMMUNODEFICIENCY VIRUS
YLSWVPAHK

SEQ ID NO: 10025 - protein, 9 aa, HUMAN IMMUNODEFICIENCY VIRUS
RDPIWKGPA

SEQ ID NO: 10026 - protein, 9 aa, HUMAN IMMUNODEFICIENCY VIRUS
VIQDNSDIK

SEQ ID NO: 10027 - protein, 10 aa, HUMAN IMMUNODEFICIENCY VIRUS
NTPVFAIKKK

SEQ ID NO: 10028 - protein, 10 aa, HUMAN IMMUNODEFICIENCY VIRUS
VVIQDNSDIK

SEQ ID NO: 10029 - protein, 11 aa, HUMAN IMMUNODEFICIENCY VIRUS
AVVIQDNSDIK

SEQ ID NO: 10030 - protein, 8 aa, HUMAN IMMUNODEFICIENCY VIRUS
IFQSSMTK

SEQ ID NO: 10031 - protein, 11 aa, HUMAN IMMUNODEFICIENCY VIRUS
ILKEPVHGVYY

SEQ ID NO: 10032 - protein, 11 aa, HUMAN IMMUNODEFICIENCY VIRUS
LDGIDKAQEEH

SEQ ID NO: 10033 - protein, 8 aa, HUMAN IMMUNODEFICIENCY VIRUS
HSNWRAMA

SEQ ID NO: 10034 - protein, 9 aa, HUMAN IMMUNODEFICIENCY VIRUS
AGYVTDRGR

SEQ ID NO: 10035 - protein, 9 aa, HUMAN IMMUNODEFICIENCY VIRUS
YVTDRGRQK

SEQ ID NO: 10036 - protein, 10 aa, HUMAN IMMUNODEFICIENCY VIRUS
KAGYVTDRGR

SEQ ID NO: 10037 - protein, 10 aa, HUMAN IMMUNODEFICIENCY VIRUS
LGIIQAQPDK

SEQ ID NO: 10038 - protein, 10 aa, HUMAN IMMUNODEFICIENCY VIRUS
DGIDKAQEEH

SEQ ID NO: 10039 - protein, 10 aa, HUMAN IMMUNODEFICIENCY VIRUS
DIKVVPRRKA

SEQ ID NO: 10040 - protein, 11 aa, HUMAN IMMUNODEFICIENCY VIRUS
PVHGVYYDPSK

SEQ ID NO: 10041 - protein, 11 aa, HUMAN IMMUNODEFICIENCY VIRUS
AGYVTDRGRQK

SEQ ID NO: 10042 - protein, 11 aa, HUMAN IMMUNODEFICIENCY VIRUS
ALGIIQAQPDK

SEQ ID NO: 10043 - protein, 11 aa, HUMAN IMMUNODEFICIENCY VIRUS
DIKVVPRRKAK

SEQ ID NO: 10044 - protein, 8 aa, HUMAN IMMUNODEFICIENCY VIRUS
VTDRGRQK

SEQ ID NO: 10045 - protein, 8 aa, HUMAN IMMUNODEFICIENCY VIRUS
IIQAQPDK

SEQ ID NO: 10046 - protein, 9 aa, HUMAN IMMUNODEFICIENCY VIRUS
GIIQAQPDK

SEQ ID NO: 10047 - protein, 9 aa, HUMAN IMMUNODEFICIENCY VIRUS
GIDKAQEEH

SEQ ID NO: 10048 - protein, 9 aa, HUMAN IMMUNODEFICIENCY VIRUS
NSDIKVVPR

SEQ ID NO: 10049 - protein, 10 aa, HUMAN IMMUNODEFICIENCY VIRUS
ILKEPVHGVY

SEQ ID NO: 10050 - protein, 10 aa, HUMAN IMMUNODEFICIENCY VIRUS
NSDIKVVPRR

SEQ ID NO: 10051 - protein, 11 aa, HUMAN IMMUNODEFICIENCY VIRUS
EILKEPVHGVY

SEQ ID NO: 10052 - protein, 11 aa, HUMAN IMMUNODEFICIENCY VIRUS
WTYQIYQEPFK

SEQ ID NO: 10053 - protein, 11 aa, HUMAN IMMUNODEFICIENCY VIRUS
QIYQEPFKNLK

SEQ ID NO: 10054 - protein, 11 aa, HUMAN IMMUNODEFICIENCY VIRUS
SAGERIIDIIA

SEQ ID NO: 10055 - protein, 11 aa, HUMAN IMMUNODEFICIENCY VIRUS
QDNSDIKVVPR

SEQ ID NO: 10056 - protein, 11 aa, HUMAN IMMUNODEFICIENCY VIRUS
NSDIKVVPRRK

SEQ ID NO: 10057 - protein, 11 aa, HUMAN IMMUNODEFICIENCY VIRUS
ESIVIWGKTPK

SEQ ID NO: 10058 - protein, 8 aa, HUMAN IMMUNODEFICIENCY VIRUS
FFRENLAF

SEQ ID NO: 10059 - protein, 8 aa, HUMAN IMMUNODEFICIENCY VIRUS
QIGCTLNF

SEQ ID NO: 10060 - protein, 8 aa, HUMAN IMMUNODEFICIENCY VIRUS
QIYQEPFK

SEQ ID NO: 10061 - protein, 8 aa, HUMAN IMMUNODEFICIENCY VIRUS
IDKAQEEH

SEQ ID NO: 10062 - protein, 8 aa, HUMAN IMMUNODEFICIENCY VIRUS
KAKIIRDY

SEQ ID NO: 10063 - protein, 10 aa, HUMAN IMMUNODEFICIENCY VIRUS
LTQIGCTLNF

SEQ ID NO: 10064 - protein, 10 aa, HUMAN IMMUNODEFICIENCY VIRUS
AGERIIDIIA

SEQ ID NO: 10065 - protein, 10 aa, HUMAN IMMUNODEFICIENCY VIRUS
KAKIIRDYGK

SEQ ID NO: 10066 - protein, 11 aa, HUMAN IMMUNODEFICIENCY VIRUS
KISKIGPENPY

SEQ ID NO: 10067 - protein, 11 aa, HUMAN IMMUNODEFICIENCY VIRUS
SIVIWGKTPKF

SEQ ID NO: 10068 - protein, 8 aa, HUMAN IMMUNODEFICIENCY VIRUS
DFRKYTAF

SEQ ID NO: 10069 - protein, 8 aa, HUMAN IMMUNODEFICIENCY VIRUS
KAGYVTDR

SEQ ID NO: 10070 - protein, 10 aa, HUMAN IMMUNODEFICIENCY VIRUS
ISKIGPENPY

SEQ ID NO: 10071 - protein, 10 aa, HUMAN IMMUNODEFICIENCY VIRUS
SMTKILEPFR

SEQ ID NO: 10072 - protein, 10 aa, HUMAN IMMUNODEFICIENCY VIRUS
WTYQIYQEPF

SEQ ID NO: 10073 - protein, 10 aa, HUMAN IMMUNODEFICIENCY VIRUS
SIVIWGKTPK

SEQ ID NO: 10074 - protein, 10 aa, HUMAN IMMUNODEFICIENCY VIRUS
TTNQKTELQA

SEQ ID NO: 10075 - protein, 11 aa, HUMAN IMMUNODEFICIENCY VIRUS
IVIYQYMDDLY

SEQ ID NO: 10076 - protein, 11 aa, HUMAN IMMUNODEFICIENCY VIRUS
VVPRRKAKIIR

SEQ ID NO: 10077 - protein, 8 aa, HUMAN IMMUNODEFICIENCY VIRUS
GVYYDPSK

SEQ ID NO: 10078 - protein, 8 aa, HUMAN IMMUNODEFICIENCY VIRUS
SCDKCQLK

SEQ ID NO: 10079 - protein, 9 aa, HUMAN IMMUNODEFICIENCY VIRUS
SMTKILEPF

SEQ ID NO: 10080 - protein, 9 aa, HUMAN IMMUNODEFICIENCY VIRUS
MTKILEPFR

SEQ ID NO: 10081 - protein, 9 aa, HUMAN IMMUNODEFICIENCY VIRUS
HGVYYDPSK

SEQ ID NO: 10082 - protein, 9 aa, HUMAN IMMUNODEFICIENCY VIRUS
ASCDKCQLK

SEQ ID NO: 10083 - protein, 10 aa, HUMAN IMMUNODEFICIENCY VIRUS
DSWTVNDIQK

SEQ ID NO: 10084 - protein, 10 aa, HUMAN IMMUNODEFICIENCY VIRUS
TFYVDGAANR

SEQ ID NO: 10085 - protein, 10 aa, HUMAN IMMUNODEFICIENCY VIRUS
VASCDKCQLK

SEQ ID NO: 10086 - protein, 10 aa, HUMAN IMMUNODEFICIENCY VIRUS
KIIGQVRDQA

SEQ ID NO: 10087 - protein, 11 aa, HUMAN IMMUNODEFICIENCY VIRUS
KDSWTVNDIQK

SEQ ID NO: 10088 - protein, 11 aa, HUMAN IMMUNODEFICIENCY VIRUS
ETFYVDGAANR

SEQ ID NO: 10089 - protein, 11 aa, HUMAN IMMUNODEFICIENCY VIRUS
IVASCDKCQLK

SEQ ID NO: 10090 - protein, 11 aa, HUMAN IMMUNODEFICIENCY VIRUS
SCDKCQLKGEA

SEQ ID NO: 10091 - protein, 8 aa, HUMAN IMMUNODEFICIENCY VIRUS
MTKILEPF

SEQ ID NO: 10092 - protein, 8 aa, HUMAN IMMUNODEFICIENCY VIRUS
IGQVRDQA

SEQ ID NO: 10093 - protein, 8 aa, HUMAN IMMUNODEFICIENCY VIRUS
SDIKVVPR

SEQ ID NO: 10094 - protein, 8 aa, HUMAN IMMUNODEFICIENCY VIRUS
MAGDDCVA

SEQ ID NO: 10095 - protein, 9 aa, HUMAN IMMUNODEFICIENCY VIRUS
IIGQVRDQA

SEQ ID NO: 10096 - protein, 9 aa, HUMAN IMMUNODEFICIENCY VIRUS
SDIKVVPRR

SEQ ID NO: 10097 - protein, 9 aa, HUMAN IMMUNODEFICIENCY VIRUS
QMAGDDCVA

SEQ ID NO: 10098 - protein, 10 aa, HUMAN IMMUNODEFICIENCY VIRUS
VDGAANRETK

SEQ ID NO: 10099 - protein, 10 aa, HUMAN IMMUNODEFICIENCY VIRUS
IGQVRDQAEH

SEQ ID NO: 10100 - protein, 10 aa, HUMAN IMMUNODEFICIENCY VIRUS
QVRDQAEHLK

SEQ ID NO: 10101 - protein, 10 aa, HUMAN IMMUNODEFICIENCY VIRUS
SDIKVVPRRK

SEQ ID NO: 10102 - protein, 11 aa, HUMAN IMMUNODEFICIENCY VIRUS
PFKNLKTGKYA

SEQ ID NO: 10103 - protein, 11 aa, HUMAN IMMUNODEFICIENCY VIRUS
GAETFYVDGAA

SEQ ID NO: 10104 - protein, 11 aa, HUMAN IMMUNODEFICIENCY VIRUS
YVDGAANRETK

SEQ ID NO: 10105 - protein, 11 aa, HUMAN IMMUNODEFICIENCY VIRUS
IIGQVRDQAEH

SEQ ID NO: 10106 - protein, 11 aa, HUMAN IMMUNODEFICIENCY VIRUS
VAKEIVASCDK

SEQ ID NO: 10107 - protein, 8 aa, HUMAN IMMUNODEFICIENCY VIRUS
GAANRETK

SEQ ID NO: 10108 - protein, 8 aa, HUMAN IMMUNODEFICIENCY VIRUS
EIVASCDK

SEQ ID NO: 10109 - protein, 9 aa, HUMAN IMMUNODEFICIENCY VIRUS
DGAANRETK

SEQ ID NO: 10110 - protein, 10 aa, HUMAN IMMUNODEFICIENCY VIRUS
PFKNLKTGKY

SEQ ID NO: 10111 - protein, 10 aa, HUMAN IMMUNODEFICIENCY VIRUS
RDQAEHLKTA

SEQ ID NO: 10112 - protein, 11 aa, HUMAN IMMUNODEFICIENCY VIRUS
PLVKLWYQLEK

SEQ ID NO: 10113 - protein, 8 aa, HUMAN IMMUNODEFICIENCY VIRUS
EILKEPVH

SEQ ID NO: 10114 - protein, 8 aa, HUMAN IMMUNODEFICIENCY VIRUS
KLWYQLEK

SEQ ID NO: 10115 - protein, 8 aa, HUMAN IMMUNODEFICIENCY VIRUS
RDQAEHLK

SEQ ID NO: 10116 - protein, 9 aa, HUMAN IMMUNODEFICIENCY VIRUS
PFKNLKTGK

SEQ ID NO: 10117 - protein, 9 aa, HUMAN IMMUNODEFICIENCY VIRUS
DIQTKELQK

SEQ ID NO: 10118 - protein, 10 aa, HUMAN IMMUNODEFICIENCY VIRUS
LVKLWYQLEK

SEQ ID NO: 10119 - protein, 11 aa, HUMAN IMMUNODEFICIENCY VIRUS
KVKQWPLTEEK

SEQ ID NO: 10120 - protein, 9 aa, HUMAN IMMUNODEFICIENCY VIRUS
VIWGKTPKF

SEQ ID NO: 10121 - protein, 10 aa, HUMAN IMMUNODEFICIENCY VIRUS
IVIWGKTPKF

SEQ ID NO: 10122 - protein, 8 aa, HUMAN IMMUNODEFICIENCY VIRUS
VIWGKTPK

SEQ ID NO: 10123 - protein, 8 aa, HUMAN IMMUNODEFICIENCY VIRUS
QVRDQAEH

SEQ ID NO: 10124 - protein, 8 aa, HUMAN IMMUNODEFICIENCY VIRUS
DIKVVPRR

SEQ ID NO: 10125 - protein, 9 aa, HUMAN IMMUNODEFICIENCY VIRUS
IVIWGKTPK

SEQ ID NO: 10126 - protein, 9 aa, HUMAN IMMUNODEFICIENCY VIRUS
DIKVVPRRK

SEQ ID NO: 10127 - protein, 10 aa, HUMAN IMMUNODEFICIENCY VIRUS
GAETFYVDGA

SEQ ID NO: 10128 - protein, 10 aa, HUMAN IMMUNODEFICIENCY VIRUS
KVLFLDGIDK

SEQ ID NO: 10129 - protein, 10 aa, HUMAN IMMUNODEFICIENCY VIRUS
CDKCQLKGEA

SEQ ID NO: 10130 - protein, 10 aa, HUMAN IMMUNODEFICIENCY VIRUS
KCQLKGEAMH

SEQ ID NO: 10131 - protein, 10 aa, HUMAN IMMUNODEFICIENCY VIRUS
VVESMNKELK

SEQ ID NO: 10132 - protein, 11 aa, HUMAN IMMUNODEFICIENCY VIRUS
KVLFLDGIDKA

SEQ ID NO: 10133 - protein, 11 aa, HUMAN IMMUNODEFICIENCY VIRUS
GVVESMNKELK

SEQ ID NO: 10134 - protein, 11 aa, HUMAN IMMUNODEFICIENCY VIRUS
VVESMNKELKK

SEQ ID NO: 10135 - protein, 8 aa, HUMAN IMMUNODEFICIENCY VIRUS
GVVESMNK

SEQ ID NO: 10136 - protein, 8 aa, HUMAN IMMUNODEFICIENCY VIRUS
RDYGKQMA

SEQ ID NO: 10137 - protein, 9 aa, HUMAN IMMUNODEFICIENCY VIRUS
QGVVESMNK

SEQ ID NO: 10138 - protein, 10 aa, HUMAN IMMUNODEFICIENCY VIRUS
KLKPGMDGPK

SEQ ID NO: 10139 - protein, 10 aa, HUMAN IMMUNODEFICIENCY VIRUS
IIRDYGKQMA

SEQ ID NO: 10140 - protein, 11 aa, HUMAN IMMUNODEFICIENCY VIRUS
QSQGVVESMNK

SEQ ID NO: 10141 - protein, 11 aa, HUMAN IMMUNODEFICIENCY VIRUS
KIIRDYGKQMA

SEQ ID NO: 10142 - protein, 8 aa, HUMAN IMMUNODEFICIENCY VIRUS
ESIVIWGK

SEQ ID NO: 10143 - protein, 8 aa, HUMAN IMMUNODEFICIENCY VIRUS
YVDGAANR

SEQ ID NO: 10144 - protein, 8 aa, HUMAN IMMUNODEFICIENCY VIRUS
LAGRWPVK

SEQ ID NO: 10145 - protein, 8 aa, HUMAN IMMUNODEFICIENCY VIRUS
KIIRDYGK

SEQ ID NO: 10146 - protein, 9 aa, HUMAN IMMUNODEFICIENCY VIRUS
KLAGRWPVK

SEQ ID NO: 10147 - protein, 8 aa, HUMAN IMMUNODEFICIENCY VIRUS
GMDGPKVK

SEQ ID NO: 10148 - protein, 8 aa, HUMAN IMMUNODEFICIENCY VIRUS
KIGPENPY

SEQ ID NO: 10149 - protein, 8 aa, HUMAN IMMUNODEFICIENCY VIRUS
FTTPDKKH

SEQ ID NO: 10150 - protein, 8 aa, HUMAN IMMUNODEFICIENCY VIRUS
TFYVDGAA

SEQ ID NO: 10151 - protein, 8 aa, HUMAN IMMUNODEFICIENCY VIRUS
HTDNGSNF

SEQ ID NO: 10152 - protein, 9 aa, HUMAN IMMUNODEFICIENCY VIRUS
PGMDGPKVK

SEQ ID NO: 10153 - protein, 9 aa, HUMAN IMMUNODEFICIENCY VIRUS
GFTTPDKKH

SEQ ID NO: 10154 - protein, 9 aa, HUMAN IMMUNODEFICIENCY VIRUS
ETFYVDGAA

SEQ ID NO: 10155 - protein, 9 aa, HUMAN IMMUNODEFICIENCY VIRUS
VLFLDGIDK

SEQ ID NO: 10156 - protein, 10 aa, HUMAN IMMUNODEFICIENCY VIRUS
VIYQYMDDLY

SEQ ID NO: 10157 - protein, 10 aa, HUMAN IMMUNODEFICIENCY VIRUS
WGFTTPDKKH

SEQ ID NO: 10158 - protein, 10 aa, HUMAN IMMUNODEFICIENCY VIRUS
FTTPDKKHQK

SEQ ID NO: 10159 - protein, 10 aa, HUMAN IMMUNODEFICIENCY VIRUS
VLFLDGIDKA

SEQ ID NO: 10160 - protein, 11 aa, HUMAN IMMUNODEFICIENCY VIRUS
KSVTVLDVGDA

SEQ ID NO: 10161 - protein, 11 aa, HUMAN IMMUNODEFICIENCY VIRUS
GFTTPDKKHQK

SEQ ID NO: 10162 - protein, 10 aa, HUMAN IMMUNODEFICIENCY VIRUS
QATWIPEWEF

SEQ ID NO: 10163 - protein, 8 aa, HUMAN IMMUNODEFICIENCY VIRUS
PAGLKKKK

SEQ ID NO: 10164 - protein, 8 aa, HUMAN IMMUNODEFICIENCY VIRUS
SDLEIGQH

SEQ ID NO: 10165 - protein, 8 aa, HUMAN IMMUNODEFICIENCY VIRUS
DLEIGQHR

SEQ ID NO: 10166 - protein, 8 aa, HUMAN IMMUNODEFICIENCY VIRUS
WGFTTPDK

SEQ ID NO: 10167 - protein, 8 aa, HUMAN IMMUNODEFICIENCY VIRUS
GFTTPDKK

SEQ ID NO: 10168 - protein, 8 aa, HUMAN IMMUNODEFICIENCY VIRUS
KCQLKGEA

SEQ ID NO: 10169 - protein, 8 aa, HUMAN IMMUNODEFICIENCY VIRUS
VASGYIEA

SEQ ID NO: 10170 - protein, 8 aa, HUMAN IMMUNODEFICIENCY VIRUS
KIQNFRVY

SEQ ID NO: 10171 - protein, 8 aa, HUMAN IMMUNODEFICIENCY VIRUS
KVVPRRKA

SEQ ID NO: 10172 - protein, 8 aa, HUMAN IMMUNODEFICIENCY VIRUS
VVPRRKAK

SEQ ID NO: 10173 - protein, 9 aa, HUMAN IMMUNODEFICIENCY VIRUS
ETPGIRYQY

SEQ ID NO: 10174 - protein, 9 aa, HUMAN IMMUNODEFICIENCY VIRUS
GSDLEIGQH

SEQ ID NO: 10175 - protein, 9 aa, HUMAN IMMUNODEFICIENCY VIRUS
SDLEIGQHR

SEQ ID NO: 10176 - protein, 9 aa, HUMAN IMMUNODEFICIENCY VIRUS
WGFTTPDKK

SEQ ID NO: 10177 - protein, 9 aa, HUMAN IMMUNODEFICIENCY VIRUS
ATWIPEWEF

SEQ ID NO: 10178 - protein, 9 aa, HUMAN IMMUNODEFICIENCY VIRUS
HVASGYIEA

SEQ ID NO: 10179 - protein, 9 aa, HUMAN IMMUNODEFICIENCY VIRUS
KIQNFRVYY

SEQ ID NO: 10180 - protein, 9 aa, HUMAN IMMUNODEFICIENCY VIRUS
KVVPRRKAK

SEQ ID NO: 10181 - protein, 10 aa, HUMAN IMMUNODEFICIENCY VIRUS
VGSDLEIGQH

SEQ ID NO: 10182 - protein, 10 aa, HUMAN IMMUNODEFICIENCY VIRUS
GSDLEIGQHR

SEQ ID NO: 10183 - protein, 10 aa, HUMAN IMMUNODEFICIENCY VIRUS
KIQNFRVYYR

SEQ ID NO: 10184 - protein, 10 aa, HUMAN IMMUNODEFICIENCY VIRUS
NFRVYYRDSR

SEQ ID NO: 10185 - protein, 11 aa, HUMAN IMMUNODEFICIENCY VIRUS
IGGIGGFIKVR

SEQ ID NO: 10186 - protein, 11 aa, HUMAN IMMUNODEFICIENCY VIRUS
VGPTPVNIIGR

SEQ ID NO: 10187 - protein, 11 aa, HUMAN IMMUNODEFICIENCY VIRUS
YVGSDLEIGQH

SEQ ID NO: 10188 - protein, 11 aa, HUMAN IMMUNODEFICIENCY VIRUS
VGSDLEIGQHR

SEQ ID NO: 10189 - protein, 11 aa, HUMAN IMMUNODEFICIENCY VIRUS
AVHVASGYIEA

SEQ ID NO: 10190 - protein, 11 aa, HUMAN IMMUNODEFICIENCY VIRUS
SGYIEAEVIPA

SEQ ID NO: 10191 - protein, 11 aa, HUMAN IMMUNODEFICIENCY VIRUS
GIPHPAGLKKK

SEQ ID NO: 10192 - protein, 8 aa, HUMAN IMMUNODEFICIENCY VIRUS
IGGFIKVR

SEQ ID NO: 10193 - protein, 8 aa, HUMAN IMMUNODEFICIENCY VIRUS
GFIKVRQY

SEQ ID NO: 10194 - protein, 8 aa, HUMAN IMMUNODEFICIENCY VIRUS
PIETVPVK

SEQ ID NO: 10195 - protein, 8 aa, HUMAN IMMUNODEFICIENCY VIRUS
ETVPVKLK

SEQ ID NO: 10196 - protein, 8 aa, HUMAN IMMUNODEFICIENCY VIRUS
ELELAENR

SEQ ID NO: 10197 - protein, 8 aa, HUMAN IMMUNODEFICIENCY VIRUS
QLKGEAMH

SEQ ID NO: 10198 - protein, 8 aa, HUMAN IMMUNODEFICIENCY VIRUS
ESMNKELK

SEQ ID NO: 10199 - protein, 8 aa, HUMAN IMMUNODEFICIENCY VIRUS
SMNKELKK

SEQ ID NO: 10200 - protein, 9 aa, HUMAN IMMUNODEFICIENCY VIRUS
GIGGFIKVR

SEQ ID NO: 10201 - protein, 9 aa, HUMAN IMMUNODEFICIENCY VIRUS
GGFIKVRQY

SEQ ID NO: 10202 - protein, 9 aa, HUMAN IMMUNODEFICIENCY VIRUS
YIEAEVIPA

SEQ ID NO: 10203 - protein, 9 aa, HUMAN IMMUNODEFICIENCY VIRUS
ESMNKELKK

SEQ ID NO: 10204 - protein, 10 aa, HUMAN IMMUNODEFICIENCY VIRUS
GGIGGFIKVR

SEQ ID NO: 10205 - protein, 10 aa, HUMAN IMMUNODEFICIENCY VIRUS
IGGFIKVRQY

SEQ ID NO: 10206 - protein, 10 aa, HUMAN IMMUNODEFICIENCY VIRUS
ISPIETVPVK

SEQ ID NO: 10207 - protein, 10 aa, HUMAN IMMUNODEFICIENCY VIRUS
PIETVPVKLK

SEQ ID NO: 10208 - protein, 10 aa, HUMAN IMMUNODEFICIENCY VIRUS
EAELELAENR

SEQ ID NO: 10209 - protein, 10 aa, HUMAN IMMUNODEFICIENCY VIRUS
LVAVHVASGY

SEQ ID NO: 10210 - protein, 11 aa, HUMAN IMMUNODEFICIENCY VIRUS
GIGGFIKVRQY

SEQ ID NO: 10211 - protein, 11 aa, HUMAN IMMUNODEFICIENCY VIRUS
PISPIETVPVK

SEQ ID NO: 10212 - protein, 11 aa, HUMAN IMMUNODEFICIENCY VIRUS
ILVAVHVASGY

SEQ ID NO: 10213 - protein, 9 aa, HUMAN IMMUNODEFICIENCY VIRUS
FVNTPPLVK

SEQ ID NO: 10214 - protein, 10 aa, HUMAN IMMUNODEFICIENCY VIRUS
GIPHPAGLKK

SEQ ID NO: 10215 - protein, 11 aa, HUMAN IMMUNODEFICIENCY VIRUS
LGIPHPAGLKK

SEQ ID NO: 10216 - protein, 8 aa, HUMAN IMMUNODEFICIENCY VIRUS
ILVAVHVA

SEQ ID NO: 10217 - protein, 9 aa, HUMAN IMMUNODEFICIENCY VIRUS
PTPVNIIGR

SEQ ID NO: 10218 - protein, 9 aa, HUMAN IMMUNODEFICIENCY VIRUS
PLTEEKIKA

SEQ ID NO: 10219 - protein, 9 aa, HUMAN IMMUNODEFICIENCY VIRUS
LAENREILK

SEQ ID NO: 10220 - protein, 10 aa, HUMAN IMMUNODEFICIENCY VIRUS
EVQLGIPHPA

SEQ ID NO: 10221 - protein, 10 aa, HUMAN IMMUNODEFICIENCY VIRUS
ELAENREILK

SEQ ID NO: 10222 - protein, 10 aa, HUMAN IMMUNODEFICIENCY VIRUS
EFVNTPPLVK

SEQ ID NO: 10223 - protein, 8 aa, HUMAN IMMUNODEFICIENCY VIRUS
PLTEEKIK

SEQ ID NO: 10224 - protein, 8 aa, HUMAN IMMUNODEFICIENCY VIRUS
ETFYVDGA

SEQ ID NO: 10225 - protein, 8 aa, HUMAN IMMUNODEFICIENCY VIRUS
LFLDGIDK

SEQ ID NO: 10226 - protein, 8 aa, HUMAN IMMUNODEFICIENCY VIRUS
FLDGIDKA

SEQ ID NO: 10227 - protein, 9 aa, HUMAN IMMUNODEFICIENCY VIRUS
LFLDGIDKA

SEQ ID NO: 10228 - protein, 8 aa, HUMAN IMMUNODEFICIENCY VIRUS
QLGIPHPA

SEQ ID NO: 10229 - protein, 9 aa, HUMAN IMMUNODEFICIENCY VIRUS
GIPHPAGLK

SEQ ID NO: 10230 - protein, 9 aa, HUMAN IMMUNODEFICIENCY VIRUS
KGGIGGYSA

SEQ ID NO: 10231 - protein, 10 aa, HUMAN IMMUNODEFICIENCY VIRUS
LGIPHPAGLK

SEQ ID NO: 10232 - protein, 11 aa, HUMAN IMMUNODEFICIENCY VIRUS
QLGIPHPAGLK

SEQ ID NO: 10233 - protein, 8 aa, HUMAN IMMUNODEFICIENCY VIRUS
LTEEKIKA

SEQ ID NO: 10234 - protein, 10 aa, HUMAN IMMUNODEFICIENCY VIRUS
VTVLDVGDAY

SEQ ID NO: 10235 - protein, 10 aa, HUMAN IMMUNODEFICIENCY VIRUS
ELKKIIGQVR

SEQ ID NO: 10236 - protein, 11 aa, HUMAN IMMUNODEFICIENCY VIRUS
DFWEVQLGIPH

SEQ ID NO: 10237 - protein, 11 aa, HUMAN IMMUNODEFICIENCY VIRUS
SVTVLDVGDAY

SEQ ID NO: 10238 - protein, 11 aa, HUMAN IMMUNODEFICIENCY VIRUS
VTVLDVGDAYF

SEQ ID NO: 10239 - protein, 11 aa, HUMAN IMMUNODEFICIENCY VIRUS
PAETGQETAYF

SEQ ID NO: 10240 - protein, 11 aa, HUMAN IMMUNODEFICIENCY VIRUS
KTAVQMAVFIH

SEQ ID NO: 10241 - protein, 8 aa, HUMAN IMMUNODEFICIENCY VIRUS
TGQETAYF

SEQ ID NO: 10242 - protein, 9 aa, HUMAN IMMUNODEFICIENCY VIRUS
AIKKKDSTK

SEQ ID NO: 10243 - protein, 9 aa, HUMAN IMMUNODEFICIENCY VIRUS
ELNKRTQDF

SEQ ID NO: 10244 - protein, 9 aa, HUMAN IMMUNODEFICIENCY VIRUS
VTVLDVGDA

SEQ ID NO: 10245 - protein, 9 aa, HUMAN IMMUNODEFICIENCY VIRUS
TVLDVGDAY

SEQ ID NO: 10246 - protein, 9 aa, HUMAN IMMUNODEFICIENCY VIRUS
TTPDKKHQK

SEQ ID NO: 10247 - protein, 9 aa, HUMAN IMMUNODEFICIENCY VIRUS
ETGQETAYF

SEQ ID NO: 10248 - protein, 9 aa, HUMAN IMMUNODEFICIENCY VIRUS
HLKTAVQMA

SEQ ID NO: 10249 - protein, 9 aa, HUMAN IMMUNODEFICIENCY VIRUS
KTAVQMAVF

SEQ ID NO: 10250 - protein, 10 aa, HUMAN IMMUNODEFICIENCY VIRUS
FAIKKKDSTK

SEQ ID NO: 10251 - protein, 10 aa, HUMAN IMMUNODEFICIENCY VIRUS
SVTVLDVGDA

SEQ ID NO: 10252 - protein, 10 aa, HUMAN IMMUNODEFICIENCY VIRUS
TVLDVGDAYF

SEQ ID NO: 10253 - protein, 10 aa, HUMAN IMMUNODEFICIENCY VIRUS
NTPPLVKLWY

SEQ ID NO: 10254 - protein, 11 aa, HUMAN IMMUNODEFICIENCY VIRUS
AIKKKDSTKWR

SEQ ID NO: 10255 - protein, 11 aa, HUMAN IMMUNODEFICIENCY VIRUS
HLKTAVQMAVF

SEQ ID NO: 10256 - protein, 11 aa, HUMAN IMMUNODEFICIENCY VIRUS
MAVFIHNFKRK

SEQ ID NO: 10257 - protein, 11 aa, HUMAN IMMUNODEFICIENCY VIRUS
GGIGGYSAGER

SEQ ID NO: 10258 - protein, 8 aa, HUMAN IMMUNODEFICIENCY VIRUS
NLKTGKYA

SEQ ID NO: 10259 - protein, 11 aa, HUMAN IMMUNODEFICIENCY VIRUS
VLPQGWKGSPA

SEQ ID NO: 10260 - protein, 8 aa, HUMAN IMMUNODEFICIENCY VIRUS
KDSTKWRK

SEQ ID NO: 10261 - protein, 8 aa, HUMAN IMMUNODEFICIENCY VIRUS
EVQLGIPH

SEQ ID NO: 10262 - protein, 8 aa, HUMAN IMMUNODEFICIENCY VIRUS
TVLDVGDA

SEQ ID NO: 10263 - protein, 8 aa, HUMAN IMMUNODEFICIENCY VIRUS
YALGIIQA

SEQ ID NO: 10264 - protein, 8 aa, HUMAN IMMUNODEFICIENCY VIRUS
GGNEQVDK

SEQ ID NO: 10265 - protein, 8 aa, HUMAN IMMUNODEFICIENCY VIRUS
FIHNFKRK

SEQ ID NO: 10266 - protein, 8 aa, HUMAN IMMUNODEFICIENCY VIRUS
GGYSAGER

SEQ ID NO: 10267 - protein, 8 aa, HUMAN IMMUNODEFICIENCY VIRUS
RVYYRDSR

SEQ ID NO: 10268 - protein, 9 aa, HUMAN IMMUNODEFICIENCY VIRUS
IGGNEQVDK

SEQ ID NO: 10269 - protein, 9 aa, HUMAN IMMUNODEFICIENCY VIRUS
PAETGQETA

SEQ ID NO: 10270 - protein, 9 aa, HUMAN IMMUNODEFICIENCY VIRUS
VFIHNFKRK

SEQ ID NO: 10271 - protein, 9 aa, HUMAN IMMUNODEFICIENCY VIRUS
IGGYSAGER

SEQ ID NO: 10272 - protein, 10 aa, HUMAN IMMUNODEFICIENCY VIRUS
STKWRKLVDF

SEQ ID NO: 10273 - protein, 10 aa, HUMAN IMMUNODEFICIENCY VIRUS
GIGGNEQVDK

SEQ ID NO: 10274 - protein, 10 aa, HUMAN IMMUNODEFICIENCY VIRUS
PAETGQETAY

SEQ ID NO: 10275 - protein, 10 aa, HUMAN IMMUNODEFICIENCY VIRUS
AVFIHNFKRK

SEQ ID NO: 10276 - protein, 10 aa, HUMAN IMMUNODEFICIENCY VIRUS
GIGGYSAGER

SEQ ID NO: 10277 - protein, 11 aa, HUMAN IMMUNODEFICIENCY VIRUS
DSTKWRKLVDF

SEQ ID NO: 10278 - protein, 11 aa, HUMAN IMMUNODEFICIENCY VIRUS
STKWRKLVDFR

SEQ ID NO: 10279 - protein, 11 aa, HUMAN IMMUNODEFICIENCY VIRUS
DSQYALGIIQA

SEQ ID NO: 10280 - protein, 11 aa, HUMAN IMMUNODEFICIENCY VIRUS
KGIGGNEQVDK

SEQ ID NO: 10281 - protein, 11 aa, HUMAN IMMUNODEFICIENCY VIRUS
VIPAETGQETA

SEQ ID NO: 10282 - protein, 8 aa, HUMAN IMMUNODEFICIENCY VIRUS
QGWKGSPA

SEQ ID NO: 10283 - protein, 8 aa, HUMAN IMMUNODEFICIENCY VIRUS
AVHVASGY

SEQ ID NO: 10284 - protein, 8 aa, HUMAN IMMUNODEFICIENCY VIRUS
ETGQETAY

SEQ ID NO: 10285 - protein, 8 aa, HUMAN IMMUNODEFICIENCY VIRUS
QAEHLKTA

SEQ ID NO: 10286 - protein, 8 aa, HUMAN IMMUNODEFICIENCY VIRUS
GGIGGYSA

SEQ ID NO: 10287 - protein, 9 aa, HUMAN IMMUNODEFICIENCY VIRUS
GIWQLDCTH

SEQ ID NO: 10288 - protein, 9 aa, HUMAN IMMUNODEFICIENCY VIRUS
VAVHVASGY

SEQ ID NO: 10289 - protein, 9 aa, HUMAN IMMUNODEFICIENCY VIRUS
KGPAKLLWK

SEQ ID NO: 10290 - protein, 10 aa, HUMAN IMMUNODEFICIENCY VIRUS
QGWKGSPAIF

SEQ ID NO: 10291 - protein, 10 aa, HUMAN IMMUNODEFICIENCY VIRUS
EVNIVTDSQY

SEQ ID NO: 10292 - protein, 10 aa, HUMAN IMMUNODEFICIENCY VIRUS
PGIWQLDCTH

SEQ ID NO: 10293 - protein, 10 aa, HUMAN IMMUNODEFICIENCY VIRUS
TAVQMAVFIH

SEQ ID NO: 10294 - protein, 11 aa, HUMAN IMMUNODEFICIENCY VIRUS
VGKLNWASQIY

SEQ ID NO: 10295 - protein, 11 aa, HUMAN IMMUNODEFICIENCY VIRUS
EVNIVTDSQYA

SEQ ID NO: 10296 - protein, 11 aa, HUMAN IMMUNODEFICIENCY VIRUS
NFKRKGGIGGY

SEQ ID NO: 10297 - protein, 11 aa, HUMAN IMMUNODEFICIENCY VIRUS
PAKLLWKGEGA

SEQ ID NO: 10298 - protein, 10 aa, HUMAN IMMUNODEFICIENCY VIRUS
QLDCTHLEGK

SEQ ID NO: 10299 - protein, 8 aa, HUMAN IMMUNODEFICIENCY VIRUS
DFRELNKR

SEQ ID NO: 10300 - protein, 8 aa, HUMAN IMMUNODEFICIENCY VIRUS
VLDVGDAY

SEQ ID NO: 10301 - protein, 8 aa, HUMAN IMMUNODEFICIENCY VIRUS
MAVFIHNF

SEQ ID NO: 10302 - protein, 9 aa, HUMAN IMMUNODEFICIENCY VIRUS
VDFRELNKR

SEQ ID NO: 10303 - protein, 9 aa, HUMAN IMMUNODEFICIENCY VIRUS
VLDVGDAYF

SEQ ID NO: 10304 - protein, 9 aa, HUMAN IMMUNODEFICIENCY VIRUS
MGYELHPDK

SEQ ID NO: 10305 - protein, 9 aa, HUMAN IMMUNODEFICIENCY VIRUS
KLNWASQIY

SEQ ID NO: 10306 - protein, 9 aa, HUMAN IMMUNODEFICIENCY VIRUS
AVQMAVFIH

SEQ ID NO: 10307 - protein, 9 aa, HUMAN IMMUNODEFICIENCY VIRUS
QMAVFIHNF

SEQ ID NO: 10308 - protein, 9 aa, HUMAN IMMUNODEFICIENCY VIRUS
MAVFIHNFK

SEQ ID NO: 10309 - protein, 9 aa, HUMAN IMMUNODEFICIENCY VIRUS
KLLWKGEGA

SEQ ID NO: 10310 - protein, 10 aa, HUMAN IMMUNODEFICIENCY VIRUS
LVDFRELNKR

SEQ ID NO: 10311 - protein, 10 aa, HUMAN IMMUNODEFICIENCY VIRUS
WMGYELHPDK

SEQ ID NO: 10312 - protein, 10 aa, HUMAN IMMUNODEFICIENCY VIRUS
QMAVFIHNFK

SEQ ID NO: 10313 - protein, 10 aa, HUMAN IMMUNODEFICIENCY VIRUS
MAVFIHNFKR

SEQ ID NO: 10314 - protein, 11 aa, HUMAN IMMUNODEFICIENCY VIRUS
KLVDFRELNKR

SEQ ID NO: 10315 - protein, 11 aa, HUMAN IMMUNODEFICIENCY VIRUS
PDKKHQKEPPF

SEQ ID NO: 10316 - protein, 11 aa, HUMAN IMMUNODEFICIENCY VIRUS
AVQMAVFIHNF

SEQ ID NO: 10317 - protein, 11 aa, HUMAN IMMUNODEFICIENCY VIRUS
QMAVFIHNFKR

SEQ ID NO: 10318 - protein, 8 aa, HUMAN IMMUNODEFICIENCY VIRUS
EALLDTGA

SEQ ID NO: 10319 - protein, 8 aa, HUMAN IMMUNODEFICIENCY VIRUS
LDVGDAYF

SEQ ID NO: 10320 - protein, 8 aa, HUMAN IMMUNODEFICIENCY VIRUS
LVGKLNWA

SEQ ID NO: 10321 - protein, 8 aa, HUMAN IMMUNODEFICIENCY VIRUS
IVTDSQYA

SEQ ID NO: 10322 - protein, 8 aa, HUMAN IMMUNODEFICIENCY VIRUS
TAVQMAVF

SEQ ID NO: 10323 - protein, 9 aa, HUMAN IMMUNODEFICIENCY VIRUS
NDIQKLVGK

SEQ ID NO: 10324 - protein, 9 aa, HUMAN IMMUNODEFICIENCY VIRUS
KLVGKLNWA

SEQ ID NO: 10325 - protein, 9 aa, HUMAN IMMUNODEFICIENCY VIRUS
NIVTDSQYA

SEQ ID NO: 10326 - protein, 9 aa, HUMAN IMMUNODEFICIENCY VIRUS
LDCTHLEGK

SEQ ID NO: 10327 - protein, 11 aa, HUMAN IMMUNODEFICIENCY VIRUS
TVNDIQKLVGK

SEQ ID NO: 10328 - protein, 8 aa, HUMAN IMMUNODEFICIENCY VIRUS
MIGGIGGF

SEQ ID NO: 10329 - protein, 8 aa, HUMAN IMMUNODEFICIENCY VIRUS
VDFRELNK

SEQ ID NO: 10330 - protein, 8 aa, HUMAN IMMUNODEFICIENCY VIRUS
WTVNDIQK

SEQ ID NO: 10331 - protein, 8 aa, HUMAN IMMUNODEFICIENCY VIRUS
DIQKLVGK

SEQ ID NO: 10332 - protein, 8 aa, HUMAN IMMUNODEFICIENCY VIRUS
NIVTDSQY

SEQ ID NO: 10333 - protein, 8 aa, HUMAN IMMUNODEFICIENCY VIRUS
DCTHLEGK

SEQ ID NO: 10334 - protein, 8 aa, HUMAN IMMUNODEFICIENCY VIRUS
AVFIHNFK

SEQ ID NO: 10335 - protein, 8 aa, HUMAN IMMUNODEFICIENCY VIRUS
VFIHNFKR

SEQ ID NO: 10336 - protein, 8 aa, HUMAN IMMUNODEFICIENCY VIRUS
LLWKGEGA

SEQ ID NO: 10337 - protein, 9 aa, HUMAN IMMUNODEFICIENCY VIRUS
KMIGGIGGF

SEQ ID NO: 10338 - protein, 9 aa, HUMAN IMMUNODEFICIENCY VIRUS
LVDFRELNK

SEQ ID NO: 10339 - protein, 9 aa, HUMAN IMMUNODEFICIENCY VIRUS
AVFIHNFKR

SEQ ID NO: 10340 - protein, 10 aa, HUMAN IMMUNODEFICIENCY VIRUS
MIGGIGGFIK

SEQ ID NO: 10341 - protein, 10 aa, HUMAN IMMUNODEFICIENCY VIRUS
KLVDFRELNK

SEQ ID NO: 10342 - protein, 11 aa, HUMAN IMMUNODEFICIENCY VIRUS
KMIGGIGGFIK

SEQ ID NO: 10343 - protein, 8 aa, HUMAN IMMUNODEFICIENCY VIRUS
NVLPQGWK

SEQ ID NO: 10344 - protein, 9 aa, HUMAN IMMUNODEFICIENCY VIRUS
IGGIGGFIK

SEQ ID NO: 10345 - protein, 8 aa, HUMAN IMMUNODEFICIENCY VIRUS
GGIGGFIK

SEQ ID NO: 10346 - protein, 9 aa, HUMAN IMMUNODEFICIENCY VIRUS
FLWMGYELH

SEQ ID NO: 10347 - protein, 10 aa, HUMAN IMMUNODEFICIENCY VIRUS
PFLWMGYELH

SEQ ID NO: 10348 - protein, 9 aa, HUMAN IMMUNODEFICIENCY VIRUS
GTRQTRKNR

SEQ ID NO: 10349 - protein, 9 aa, HUMAN IMMUNODEFICIENCY VIRUS
TTRQARRNR

SEQ ID NO: 10350 - protein, 10 aa, HUMAN IMMUNODEFICIENCY VIRUS
GTRQTRKNRR

SEQ ID NO: 10351 - protein, 10 aa, HUMAN IMMUNODEFICIENCY VIRUS
TTRQARRNRR

SEQ ID NO: 10352 - protein, 11 aa, HUMAN IMMUNODEFICIENCY VIRUS
GTRQTRKNRRR

SEQ ID NO: 10353 - protein, 11 aa, HUMAN IMMUNODEFICIENCY VIRUS
TTRQARRNRRR

SEQ ID NO: 10354 - protein, 8 aa, HUMAN IMMUNODEFICIENCY VIRUS
GTETGVGR

SEQ ID NO: 10355 - protein, 9 aa, HUMAN IMMUNODEFICIENCY VIRUS
QGTETGVGR

SEQ ID NO: 10356 - protein, 9 aa, HUMAN IMMUNODEFICIENCY VIRUS
LLKTVRLIK

SEQ ID NO: 10357 - protein, 9 aa, HUMAN IMMUNODEFICIENCY VIRUS
GDSDEELLK

SEQ ID NO: 10358 - protein, 9 aa, HUMAN IMMUNODEFICIENCY VIRUS
PLQLPPIER

SEQ ID NO: 10359 - protein, 10 aa, HUMAN IMMUNODEFICIENCY VIRUS
SGDSDEELLK

SEQ ID NO: 10360 - protein, 11 aa, HUMAN IMMUNODEFICIENCY VIRUS
RSGDSDEELLK

SEQ ID NO: 10361 - protein, 11 aa, HUMAN IMMUNODEFICIENCY VIRUS
PVPLQLPPIER

SEQ ID NO: 10362 - protein, 8 aa, HUMAN IMMUNODEFICIENCY VIRUS
RARQRQIR

SEQ ID NO: 10363 - protein, 8 aa, HUMAN IMMUNODEFICIENCY VIRUS
DSDEELLK

SEQ ID NO: 10364 - protein, 8 aa, HUMAN IMMUNODEFICIENCY VIRUS
ILSTCLGR

SEQ ID NO: 10365 - protein, 9 aa, HUMAN IMMUNODEFICIENCY VIRUS
RILSTCLGR

SEQ ID NO: 10366 - protein, 9 aa, HUMAN IMMUNODEFICIENCY VIRUS
AVRIIKILY

SEQ ID NO: 10367 - protein, 9 aa, HUMAN IMMUNODEFICIENCY VIRUS
PSPEGTRQA

SEQ ID NO: 10368 - protein, 9 aa, HUMAN IMMUNODEFICIENCY VIRUS
QLPPLERLH

SEQ ID NO: 10369 - protein, 10 aa, HUMAN IMMUNODEFICIENCY VIRUS
PSPEGTRQAR

SEQ ID NO: 10370 - protein, 11 aa, HUMAN IMMUNODEFICIENCY VIRUS
PSPEGTRQARR

SEQ ID NO: 10371 - protein, 11 aa, HUMAN IMMUNODEFICIENCY VIRUS
PLQLPPLERLH

SEQ ID NO: 10372 - protein, 11 aa, HUMAN IMMUNODEFICIENCY VIRUS
GTRQARKNRRR

SEQ ID NO: 10373 - protein, 8 aa, HUMAN IMMUNODEFICIENCY VIRUS
RARQRQIH

SEQ ID NO: 10374 - protein, 9 aa, HUMAN IMMUNODEFICIENCY VIRUS
GTRQARKNR

SEQ ID NO: 10375 - protein, 10 aa, HUMAN IMMUNODEFICIENCY VIRUS
GTRQARKNRR

SEQ ID NO: 10376 - protein, 9 aa, HUMAN IMMUNODEFICIENCY VIRUS
QARKNRRRR

SEQ ID NO: 10377 - protein, 11 aa, HUMAN IMMUNODEFICIENCY VIRUS
QARKNRRRRWR

SEQ ID NO: 10378 - protein, 8 aa, HUMAN IMMUNODEFICIENCY VIRUS
QARKNRRR

SEQ ID NO: 10379 - protein, 11 aa, HUMAN IMMUNODEFICIENCY VIRUS
IIKILYQSNPY

SEQ ID NO: 10380 - protein, 9 aa, HUMAN IMMUNODEFICIENCY VIRUS
KILYQSNPY

SEQ ID NO: 10381 - protein, 8 aa, HUMAN IMMUNODEFICIENCY VIRUS
ILYQSNPY

SEQ ID NO: 10382 - protein, 8 aa, HUMAN IMMUNODEFICIENCY VIRUS
EGTRQARR

SEQ ID NO: 10383 - protein, 10 aa, HUMAN IMMUNODEFICIENCY VIRUS
EGTRQARRNR

SEQ ID NO: 10384 - protein, 11 aa, HUMAN IMMUNODEFICIENCY VIRUS
EGTRQARRNRR

SEQ ID NO: 10385 - protein, 9 aa, HUMAN IMMUNODEFICIENCY VIRUS
GTRQARRNR

SEQ ID NO: 10386 - protein, 10 aa, HUMAN IMMUNODEFICIENCY VIRUS
GTRQARRNRR

SEQ ID NO: 10387 - protein, 11 aa, HUMAN IMMUNODEFICIENCY VIRUS
GTRQARRNRRR

SEQ ID NO: 10388 - protein, 11 aa, HUMAN IMMUNODEFICIENCY VIRUS
PVPLQLPPLER

SEQ ID NO: 10389 - protein, 9 aa, HUMAN IMMUNODEFICIENCY VIRUS
PLQLPPLER

SEQ ID NO: 10390 - protein, 11 aa, HUMAN IMMUNODEFICIENCY VIRUS
QARRNRRRRWR

SEQ ID NO: 10391 - protein, 8 aa, HUMAN IMMUNODEFICIENCY VIRUS
QARRNRRR

SEQ ID NO: 10392 - protein, 9 aa, HUMAN IMMUNODEFICIENCY VIRUS
QARRNRRRR

SEQ ID NO: 10393 - protein, 8 aa, HUMAN IMMUNODEFICIENCY VIRUS
PGGYPRRK

SEQ ID NO: 10394 - protein, 9 aa, HUMAN IMMUNODEFICIENCY VIRUS
AGPGGYPRR

SEQ ID NO: 10395 - protein, 9 aa, HUMAN IMMUNODEFICIENCY VIRUS
TGPSGQPCH

SEQ ID NO: 10396 - protein, 10 aa, HUMAN IMMUNODEFICIENCY VIRUS
ETGPSGQPCH

SEQ ID NO: 10397 - protein, 10 aa, HUMAN IMMUNODEFICIENCY VIRUS
KAGPGGYPRR

SEQ ID NO: 10398 - protein, 10 aa, HUMAN IMMUNODEFICIENCY VIRUS
AGPGGYPRRK

SEQ ID NO: 10399 - protein, 11 aa, HUMAN IMMUNODEFICIENCY VIRUS
KAGPGGYPRRK

SEQ ID NO: 10400 - protein, 11 aa, HUMAN IMMUNODEFICIENCY VIRUS
GGYPRRKGSCH

SEQ ID NO: 10401 - protein, 8 aa, HUMAN IMMUNODEFICIENCY VIRUS
PGSQPRTA

SEQ ID NO: 10402 - protein, 8 aa, HUMAN IMMUNODEFICIENCY VIRUS
ACTNCYCK

SEQ ID NO: 10403 - protein, 9 aa, HUMAN IMMUNODEFICIENCY VIRUS
TACTNCYCK

SEQ ID NO: 10404 - protein, 8 aa, HUMAN IMMUNODEFICIENCY VIRUS
YCKKCCFH

SEQ ID NO: 10405 - protein, 8 aa, HUMAN IMMUNODEFICIENCY VIRUS
YCKKCCYH

SEQ ID NO: 10406 - protein, 8 aa, HUMAN IMMUNODEFICIENCY VIRUS
CFHCQVCF

SEQ ID NO: 10407 - protein, 9 aa, HUMAN IMMUNODEFICIENCY VIRUS
VDPRLEPWK

SEQ ID NO: 10408 - protein, 9 aa, HUMAN IMMUNODEFICIENCY VIRUS
ACNNCYCKK

SEQ ID NO: 10409 - protein, 9 aa, HUMAN IMMUNODEFICIENCY VIRUS
CCFHCQVCF

SEQ ID NO: 10410 - protein, 10 aa, HUMAN IMMUNODEFICIENCY VIRUS
PVDPRLEPWK

SEQ ID NO: 10411 - protein, 10 aa, HUMAN IMMUNODEFICIENCY VIRUS
VDPRLEPWKH

SEQ ID NO: 10412 - protein, 10 aa, HUMAN IMMUNODEFICIENCY VIRUS
TACNNCYCKK

SEQ ID NO: 10413 - protein, 11 aa, HUMAN IMMUNODEFICIENCY VIRUS
PVDPRLEPWKH

SEQ ID NO: 10414 - protein, 11 aa, HUMAN IMMUNODEFICIENCY VIRUS
RGDPTGPKESK

SEQ ID NO: 10415 - protein, 11 aa, HUMAN IMMUNODEFICIENCY VIRUS
GDPTGPKESKK

SEQ ID NO: 10416 - protein, 9 aa, HUMAN IMMUNODEFICIENCY VIRUS
ESKKKVESK

SEQ ID NO: 10417 - protein, 10 aa, HUMAN IMMUNODEFICIENCY VIRUS
GDPTGPKESK

SEQ ID NO: 10418 - protein, 10 aa, HUMAN IMMUNODEFICIENCY VIRUS
PTGPKESKKK

SEQ ID NO: 10419 - protein, 9 aa, HUMAN IMMUNODEFICIENCY VIRUS
TGPKESKKK

SEQ ID NO: 10420 - protein, 10 aa, HUMAN IMMUNODEFICIENCY VIRUS
FLNKGLGISY

SEQ ID NO: 10421 - protein, 11 aa, HUMAN IMMUNODEFICIENCY VIRUS
PVDPNLEPWNH

SEQ ID NO: 10422 - protein, 11 aa, HUMAN IMMUNODEFICIENCY VIRUS
CFLNKGLGISY

SEQ ID NO: 10423 - protein, 8 aa, HUMAN IMMUNODEFICIENCY VIRUS
RGDPTGPK

SEQ ID NO: 10424 - protein, 10 aa, HUMAN IMMUNODEFICIENCY VIRUS
VDPNLEPWNH

SEQ ID NO: 10425 - protein, 8 aa, HUMAN IMMUNODEFICIENCY VIRUS
ACNNCYCK

SEQ ID NO: 10426 - protein, 9 aa, HUMAN IMMUNODEFICIENCY VIRUS
TACNNCYCK

SEQ ID NO: 10427 - protein, 9 aa, HUMAN IMMUNODEFICIENCY VIRUS
PTGPKESKK

SEQ ID NO: 10428 - protein, 8 aa, HUMAN IMMUNODEFICIENCY VIRUS
TGPKESKK

SEQ ID NO: 10429 - protein, 8 aa, HUMAN IMMUNODEFICIENCY VIRUS
PTGPKESK

SEQ ID NO: 10430 - protein, 11 aa, HUMAN IMMUNODEFICIENCY VIRUS
YGRKKRRQRRR

SEQ ID NO: 10431 - protein, 8 aa, HUMAN IMMUNODEFICIENCY VIRUS
PGSQPKTA

SEQ ID NO: 10432 - protein, 10 aa, HUMAN IMMUNODEFICIENCY VIRUS
YGRKKRRQRR

SEQ ID NO: 10433 - protein, 11 aa, HUMAN IMMUNODEFICIENCY VIRUS
ISYGRKKRRQR

SEQ ID NO: 10434 - protein, 9 aa, HUMAN IMMUNODEFICIENCY VIRUS
YGRKKRRQR

SEQ ID NO: 10435 - protein, 10 aa, HUMAN IMMUNODEFICIENCY VIRUS
GISYGRKKRR

SEQ ID NO: 10436 - protein, 11 aa, HUMAN IMMUNODEFICIENCY VIRUS
LGISYGRKKRR

SEQ ID NO: 10437 - protein, 9 aa, HUMAN IMMUNODEFICIENCY VIRUS
ISYGRKKRR

SEQ ID NO: 10438 - protein, 11 aa, HUMAN IMMUNODEFICIENCY VIRUS
GLGISYGRKKR

SEQ ID NO: 10439 - protein, 8 aa, HUMAN IMMUNODEFICIENCY VIRUS
GLGISYGR

SEQ ID NO: 10440 - protein, 9 aa, HUMAN IMMUNODEFICIENCY VIRUS
GLGISYGRK

SEQ ID NO: 10441 - protein, 10 aa, HUMAN IMMUNODEFICIENCY VIRUS
GLGISYGRKK

SEQ ID NO: 10442 - protein, 9 aa, HUMAN IMMUNODEFICIENCY VIRUS
KGLGISYGR

SEQ ID NO: 10443 - protein, 10 aa, HUMAN IMMUNODEFICIENCY VIRUS
KGLGISYGRK

SEQ ID NO: 10444 - protein, 11 aa, HUMAN IMMUNODEFICIENCY VIRUS
KGLGISYGRKK

SEQ ID NO: 10445 - protein, 9 aa, HUMAN IMMUNODEFICIENCY VIRUS
GISYGRKKR

SEQ ID NO: 10446 - protein, 10 aa, HUMAN IMMUNODEFICIENCY VIRUS
LGISYGRKKR

SEQ ID NO: 10447 - protein, 8 aa, HUMAN IMMUNODEFICIENCY VIRUS
LGISYGRK

SEQ ID NO: 10448 - protein, 8 aa, HUMAN IMMUNODEFICIENCY VIRUS
GISYGRKK

SEQ ID NO: 10449 - protein, 8 aa, HUMAN IMMUNODEFICIENCY VIRUS
ISYGRKKR

SEQ ID NO: 10450 - protein, 9 aa, HUMAN IMMUNODEFICIENCY VIRUS
LGISYGRKK

SEQ ID NO: 10451 - protein, 8 aa, HUMAN IMMUNODEFICIENCY VIRUS
LIVWQVDR

SEQ ID NO: 10452 - protein, 8 aa, HUMAN IMMUNODEFICIENCY VIRUS
RMRINTWK

SEQ ID NO: 10453 - protein, 8 aa, HUMAN IMMUNODEFICIENCY VIRUS
LIKPKKIK

SEQ ID NO: 10454 - protein, 9 aa, HUMAN IMMUNODEFICIENCY VIRUS
KGWFYRHHY

SEQ ID NO: 10455 - protein, 9 aa, HUMAN IMMUNODEFICIENCY VIRUS
ALIKPKKIK

SEQ ID NO: 10456 - protein, 10 aa, HUMAN IMMUNODEFICIENCY VIRUS
VDRMRINTWK

SEQ ID NO: 10457 - protein, 10 aa, HUMAN IMMUNODEFICIENCY VIRUS
GVSIEWRLRR

SEQ ID NO: 10458 - protein, 11 aa, HUMAN IMMUNODEFICIENCY VIRUS
QVDRMRINTWK

SEQ ID NO: 10459 - protein, 11 aa, HUMAN IMMUNODEFICIENCY VIRUS
RLVITTYWGLH

SEQ ID NO: 10460 - protein, 11 aa, HUMAN IMMUNODEFICIENCY VIRUS
QTGERDWHLGH

SEQ ID NO: 10461 - protein, 11 aa, HUMAN IMMUNODEFICIENCY VIRUS
GVSIEWRLRRY

SEQ ID NO: 10462 - protein, 11 aa, HUMAN IMMUNODEFICIENCY VIRUS
IDPDLADQLIH

SEQ ID NO: 10463 - protein, 11 aa, HUMAN IMMUNODEFICIENCY VIRUS
LVEDRWNKPQK

SEQ ID NO: 10464 - protein, 10 aa, HUMAN IMMUNODEFICIENCY VIRUS
YSTQIDPDLA

SEQ ID NO: 10465 - protein, 10 aa, HUMAN IMMUNODEFICIENCY VIRUS
YSTQVDPGLA

SEQ ID NO: 10466 - protein, 8 aa, HUMAN IMMUNODEFICIENCY VIRUS
SIEWRLRR

SEQ ID NO: 10467 - protein, 8 aa, HUMAN IMMUNODEFICIENCY VIRUS
TALIKPKK

SEQ ID NO: 10468 - protein, 8 aa, HUMAN IMMUNODEFICIENCY VIRUS
LVEDRWNK

SEQ ID NO: 10469 - protein, 9 aa, HUMAN IMMUNODEFICIENCY VIRUS
VSIEWRLRR

SEQ ID NO: 10470 - protein, 9 aa, HUMAN IMMUNODEFICIENCY VIRUS
SIEWRLRRY

SEQ ID NO: 10471 - protein, 9 aa, HUMAN IMMUNODEFICIENCY VIRUS
STQVDPGLA

SEQ ID NO: 10472 - protein, 9 aa, HUMAN IMMUNODEFICIENCY VIRUS
SLQYLALKA

SEQ ID NO: 10473 - protein, 9 aa, HUMAN IMMUNODEFICIENCY VIRUS
LTALIKPKK

SEQ ID NO: 10474 - protein, 9 aa, HUMAN IMMUNODEFICIENCY VIRUS
KLVEDRWNK

SEQ ID NO: 10475 - protein, 10 aa, HUMAN IMMUNODEFICIENCY VIRUS
VSIEWRLRRY

SEQ ID NO: 10476 - protein, 10 aa, HUMAN IMMUNODEFICIENCY VIRUS
GLADQLIHMH

SEQ ID NO: 10477 - protein, 10 aa, HUMAN IMMUNODEFICIENCY VIRUS
IVSPRCEYQA

SEQ ID NO: 10478 - protein, 10 aa, HUMAN IMMUNODEFICIENCY VIRUS
GSLQYLALKA

SEQ ID NO: 10479 - protein, 10 aa, HUMAN IMMUNODEFICIENCY VIRUS
ALTALIKPKK

SEQ ID NO: 10480 - protein, 11 aa, HUMAN IMMUNODEFICIENCY VIRUS
PGLADQLIHMH

SEQ ID NO: 10481 - protein, 11 aa, HUMAN IMMUNODEFICIENCY VIRUS
GLADQLIHMHY

SEQ ID NO: 10482 - protein, 11 aa, HUMAN IMMUNODEFICIENCY VIRUS
VGSLQYLALKA

SEQ ID NO: 10483 - protein, 11 aa, HUMAN IMMUNODEFICIENCY VIRUS
LALTALIKPKK

SEQ ID NO: 10484 - protein, 11 aa, HUMAN IMMUNODEFICIENCY VIRUS
WFYRHHYESRH

SEQ ID NO: 10485 - protein, 8 aa, HUMAN IMMUNODEFICIENCY VIRUS
KGWFYRHH

SEQ ID NO: 10486 - protein, 8 aa, HUMAN IMMUNODEFICIENCY VIRUS
WGLQTGER

SEQ ID NO: 10487 - protein, 8 aa, HUMAN IMMUNODEFICIENCY VIRUS
QTGERDWH

SEQ ID NO: 10488 - protein, 8 aa, HUMAN IMMUNODEFICIENCY VIRUS
SDSAIRKA

SEQ ID NO: 10489 - protein, 8 aa, HUMAN IMMUNODEFICIENCY VIRUS
SLQYLALA

SEQ ID NO: 10490 - protein, 9 aa, HUMAN IMMUNODEFICIENCY VIRUS
IVWQVDRMK

SEQ ID NO: 10491 - protein, 9 aa, HUMAN IMMUNODEFICIENCY VIRUS
STQIDPDLA

SEQ ID NO: 10492 - protein, 9 aa, HUMAN IMMUNODEFICIENCY VIRUS
FSDSAIRKA

SEQ ID NO: 10493 - protein, 9 aa, HUMAN IMMUNODEFICIENCY VIRUS
FSESAIRNA

SEQ ID NO: 10494 - protein, 9 aa, HUMAN IMMUNODEFICIENCY VIRUS
GSLQYLALA

SEQ ID NO: 10495 - protein, 9 aa, HUMAN IMMUNODEFICIENCY VIRUS
SLQYLALAA

SEQ ID NO: 10496 - protein, 10 aa, HUMAN IMMUNODEFICIENCY VIRUS
KIRTWNSLVK

SEQ ID NO: 10497 - protein, 10 aa, HUMAN IMMUNODEFICIENCY VIRUS
LVKHHMYVSK

SEQ ID NO: 10498 - protein, 10 aa, HUMAN IMMUNODEFICIENCY VIRUS
GLQTGERDWH

SEQ ID NO: 10499 - protein, 10 aa, HUMAN IMMUNODEFICIENCY VIRUS
TGERDWHLGH

SEQ ID NO: 10500 - protein, 10 aa, HUMAN IMMUNODEFICIENCY VIRUS
HGVSIEWRLR

SEQ ID NO: 10501 - protein, 10 aa, HUMAN IMMUNODEFICIENCY VIRUS
CFSDSAIRKA

SEQ ID NO: 10502 - protein, 10 aa, HUMAN IMMUNODEFICIENCY VIRUS
CFSESAIRNA

SEQ ID NO: 10503 - protein, 10 aa, HUMAN IMMUNODEFICIENCY VIRUS
VGSLQYLALA

SEQ ID NO: 10504 - protein, 10 aa, HUMAN IMMUNODEFICIENCY VIRUS
GSLQYLALAA

SEQ ID NO: 10505 - protein, 11 aa, HUMAN IMMUNODEFICIENCY VIRUS
IVWQVDRMKIR

SEQ ID NO: 10506 - protein, 11 aa, HUMAN IMMUNODEFICIENCY VIRUS
KIRTWNSLVKH

SEQ ID NO: 10507 - protein, 11 aa, HUMAN IMMUNODEFICIENCY VIRUS
SLVKHHMYVSK

SEQ ID NO: 10508 - protein, 11 aa, HUMAN IMMUNODEFICIENCY VIRUS
LVKHHMYVSKK

SEQ ID NO: 10509 - protein, 11 aa, HUMAN IMMUNODEFICIENCY VIRUS
WGLQTGERDWH

SEQ ID NO: 10510 - protein, 11 aa, HUMAN IMMUNODEFICIENCY VIRUS
DCFSESAIRKA

SEQ ID NO: 10511 - protein, 11 aa, HUMAN IMMUNODEFICIENCY VIRUS
DCFSESAIRNA

SEQ ID NO: 10512 - protein, 11 aa, HUMAN IMMUNODEFICIENCY VIRUS
KVGSLQYLALA

SEQ ID NO: 10513 - protein, 11 aa, HUMAN IMMUNODEFICIENCY VIRUS
VGSLQYLALAA

SEQ ID NO: 10514 - protein, 10 aa, HUMAN IMMUNODEFICIENCY VIRUS
WFYRHHYESR

SEQ ID NO: 10515 - protein, 8 aa, HUMAN IMMUNODEFICIENCY VIRUS
QVDRMKIR

SEQ ID NO: 10516 - protein, 8 aa, HUMAN IMMUNODEFICIENCY VIRUS
HMYVSKKA

SEQ ID NO: 10517 - protein, 8 aa, HUMAN IMMUNODEFICIENCY VIRUS
HIPLGDAR

SEQ ID NO: 10518 - protein, 8 aa, HUMAN IMMUNODEFICIENCY VIRUS
ADQLIHMH

SEQ ID NO: 10519 - protein, 8 aa, HUMAN IMMUNODEFICIENCY VIRUS
CFSDSAIR

SEQ ID NO: 10520 - protein, 8 aa, HUMAN IMMUNODEFICIENCY VIRUS
FSDSAIRK

SEQ ID NO: 10521 - protein, 8 aa, HUMAN IMMUNODEFICIENCY VIRUS
SLQYLALK

SEQ ID NO: 10522 - protein, 8 aa, HUMAN IMMUNODEFICIENCY VIRUS
LTALIKPK

SEQ ID NO: 10523 - protein, 9 aa, HUMAN IMMUNODEFICIENCY VIRUS
LADQLIHMH

SEQ ID NO: 10524 - protein, 9 aa, HUMAN IMMUNODEFICIENCY VIRUS
ADQLIHMHY

SEQ ID NO: 10525 - protein, 9 aa, HUMAN IMMUNODEFICIENCY VIRUS
CFSDSAIRK

SEQ ID NO: 10526 - protein, 9 aa, HUMAN IMMUNODEFICIENCY VIRUS
FSESAIRKA

SEQ ID NO: 10527 - protein, 9 aa, HUMAN IMMUNODEFICIENCY VIRUS
GSLQYLALK

SEQ ID NO: 10528 - protein, 9 aa, HUMAN IMMUNODEFICIENCY VIRUS
ALTALIKPK

SEQ ID NO: 10529 - protein, 9 aa, HUMAN IMMUNODEFICIENCY VIRUS
SVKKLTEDR

SEQ ID NO: 10530 - protein, 10 aa, HUMAN IMMUNODEFICIENCY VIRUS
EVHIPLGDAR

SEQ ID NO: 10531 - protein, 10 aa, HUMAN IMMUNODEFICIENCY VIRUS
LADQLIHMHY

SEQ ID NO: 10532 - protein, 10 aa, HUMAN IMMUNODEFICIENCY VIRUS
ADQLIHMHYF

SEQ ID NO: 10533 - protein, 10 aa, HUMAN IMMUNODEFICIENCY VIRUS
DCFSESAIRK

SEQ ID NO: 10534 - protein, 10 aa, HUMAN IMMUNODEFICIENCY VIRUS
CFSESAIRKA

SEQ ID NO: 10535 - protein, 10 aa, HUMAN IMMUNODEFICIENCY VIRUS
VGSLQYLALK

SEQ ID NO: 10536 - protein, 10 aa, HUMAN IMMUNODEFICIENCY VIRUS
LALTALIKPK

SEQ ID NO: 10537 - protein, 10 aa, HUMAN IMMUNODEFICIENCY VIRUS
PSVKKLTEDR

SEQ ID NO: 10538 - protein, 11 aa, HUMAN IMMUNODEFICIENCY VIRUS
LADQLIHMHYF

SEQ ID NO: 10539 - protein, 11 aa, HUMAN IMMUNODEFICIENCY VIRUS
QLIHLYYFDCF

SEQ ID NO: 10540 - protein, 11 aa, HUMAN IMMUNODEFICIENCY VIRUS
FDCFSESAIRK

SEQ ID NO: 10541 - protein, 11 aa, HUMAN IMMUNODEFICIENCY VIRUS
YLALTALIKPK

SEQ ID NO: 10542 - protein, 8 aa, HUMAN IMMUNODEFICIENCY VIRUS
QLIHLYYF

SEQ ID NO: 10543 - protein, 8 aa, HUMAN IMMUNODEFICIENCY VIRUS
QLIHMHYF

SEQ ID NO: 10544 - protein, 8 aa, HUMAN IMMUNODEFICIENCY VIRUS
FSESAIRK

SEQ ID NO: 10545 - protein, 8 aa, HUMAN IMMUNODEFICIENCY VIRUS
IVSPRCEY

SEQ ID NO: 10546 - protein, 9 aa, HUMAN IMMUNODEFICIENCY VIRUS
GVSIEWRLR

SEQ ID NO: 10547 - protein, 9 aa, HUMAN IMMUNODEFICIENCY VIRUS
ADQLIHLYY

SEQ ID NO: 10548 - protein, 9 aa, HUMAN IMMUNODEFICIENCY VIRUS
CFSESAIRK

SEQ ID NO: 10549 - protein, 10 aa, HUMAN IMMUNODEFICIENCY VIRUS
VDRMRIRTWK

SEQ ID NO: 10550 - protein, 10 aa, HUMAN IMMUNODEFICIENCY VIRUS
LADQLIHLYY

SEQ ID NO: 10551 - protein, 10 aa, HUMAN IMMUNODEFICIENCY VIRUS
ADQLIHLYYF

SEQ ID NO: 10552 - protein, 10 aa, HUMAN IMMUNODEFICIENCY VIRUS
RCDYQAGHNK

SEQ ID NO: 10553 - protein, 11 aa, HUMAN IMMUNODEFICIENCY VIRUS
QVDRMRIRTWK

SEQ ID NO: 10554 - protein, 11 aa, HUMAN IMMUNODEFICIENCY VIRUS
RIRTWNSLVKH

SEQ ID NO: 10555 - protein, 11 aa, HUMAN IMMUNODEFICIENCY VIRUS
LADQLIHLYYF

SEQ ID NO: 10556 - protein, 11 aa, HUMAN IMMUNODEFICIENCY VIRUS
QLIHMHYFDCF

SEQ ID NO: 10557 - protein, 8 aa, HUMAN IMMUNODEFICIENCY VIRUS
RMRIRTWK

SEQ ID NO: 10558 - protein, 8 aa, HUMAN IMMUNODEFICIENCY VIRUS
RTWKSLVK

SEQ ID NO: 10559 - protein, 8 aa, HUMAN IMMUNODEFICIENCY VIRUS
VSIEWRLR

SEQ ID NO: 10560 - protein, 8 aa, HUMAN IMMUNODEFICIENCY VIRUS
ADQLIHLY

SEQ ID NO: 10561 - protein, 8 aa, HUMAN IMMUNODEFICIENCY VIRUS
HMHYFDCF

SEQ ID NO: 10562 - protein, 9 aa, HUMAN IMMUNODEFICIENCY VIRUS
RTWKSLVKH

SEQ ID NO: 10563 - protein, 9 aa, HUMAN IMMUNODEFICIENCY VIRUS
QGVSIEWRK

SEQ ID NO: 10564 - protein, 9 aa, HUMAN IMMUNODEFICIENCY VIRUS
LADQLIHLY

SEQ ID NO: 10565 - protein, 9 aa, HUMAN IMMUNODEFICIENCY VIRUS
AIRKAILGH

SEQ ID NO: 10566 - protein, 9 aa, HUMAN IMMUNODEFICIENCY VIRUS
CDYQAGHNK

SEQ ID NO: 10567 - protein, 10 aa, HUMAN IMMUNODEFICIENCY VIRUS
RIRTWKSLVK

SEQ ID NO: 10568 - protein, 10 aa, HUMAN IMMUNODEFICIENCY VIRUS
RIRTWNSLVK

SEQ ID NO: 10569 - protein, 10 aa, HUMAN IMMUNODEFICIENCY VIRUS
RTWKSLVKHH

SEQ ID NO: 10570 - protein, 10 aa, HUMAN IMMUNODEFICIENCY VIRUS
LIHMHYFDCF

SEQ ID NO: 10571 - protein, 10 aa, HUMAN IMMUNODEFICIENCY VIRUS
SAIRKAILGH

SEQ ID NO: 10572 - protein, 11 aa, HUMAN IMMUNODEFICIENCY VIRUS
RIRTWKSLVKH

SEQ ID NO: 10573 - protein, 11 aa, HUMAN IMMUNODEFICIENCY VIRUS
LGQGVSIEWRK

SEQ ID NO: 10574 - protein, 11 aa, HUMAN IMMUNODEFICIENCY VIRUS
VDPGLADQLIH

SEQ ID NO: 10575 - protein, 8 aa, HUMAN IMMUNODEFICIENCY VIRUS
ITTYWGLH

SEQ ID NO: 10576 - protein, 8 aa, HUMAN IMMUNODEFICIENCY VIRUS
GVSIEWRK

SEQ ID NO: 10577 - protein, 8 aa, HUMAN IMMUNODEFICIENCY VIRUS
HLYYFDCF

SEQ ID NO: 10578 - protein, 8 aa, HUMAN IMMUNODEFICIENCY VIRUS
RCDYQAGH

SEQ ID NO: 10579 - protein, 8 aa, HUMAN IMMUNODEFICIENCY VIRUS
LALTALIK

SEQ ID NO: 10580 - protein, 9 aa, HUMAN IMMUNODEFICIENCY VIRUS
VITTYWGLH

SEQ ID NO: 10581 - protein, 9 aa, HUMAN IMMUNODEFICIENCY VIRUS
YLALTALIK

SEQ ID NO: 10582 - protein, 9 aa, HUMAN IMMUNODEFICIENCY VIRUS
KTKGHRGSH

SEQ ID NO: 10583 - protein, 10 aa, HUMAN IMMUNODEFICIENCY VIRUS
LVITTYWGLH

SEQ ID NO: 10584 - protein, 10 aa, HUMAN IMMUNODEFICIENCY VIRUS
LIHLYYFDCF

SEQ ID NO: 10585 - protein, 11 aa, HUMAN IMMUNODEFICIENCY VIRUS
EDRWNKPQKTR

SEQ ID NO: 10586 - protein, 9 aa, HUMAN IMMUNODEFICIENCY VIRUS
KSLVKHHMY

SEQ ID NO: 10587 - protein, 11 aa, HUMAN IMMUNODEFICIENCY VIRUS
EDRWNKPQKTK

SEQ ID NO: 10588 - protein, 10 aa, HUMAN IMMUNODEFICIENCY VIRUS
RCEYQAGHNK

SEQ ID NO: 10589 - protein, 8 aa, HUMAN IMMUNODEFICIENCY VIRUS
HIPLGEAR

SEQ ID NO: 10590 - protein, 10 aa, HUMAN IMMUNODEFICIENCY VIRUS
EVHIPLGEAR

SEQ ID NO: 10591 - protein, 8 aa, HUMAN IMMUNODEFICIENCY VIRUS
HTGERDWH

SEQ ID NO: 10592 - protein, 8 aa, HUMAN IMMUNODEFICIENCY VIRUS
DLADQLIH

SEQ ID NO: 10593 - protein, 9 aa, HUMAN IMMUNODEFICIENCY VIRUS
PDLADQLIH

SEQ ID NO: 10594 - protein, 9 aa, HUMAN IMMUNODEFICIENCY VIRUS
VSPRCEYQA

SEQ ID NO: 10595 - protein, 10 aa, HUMAN IMMUNODEFICIENCY VIRUS
GLHTGERDWH

SEQ ID NO: 10596 - protein, 11 aa, HUMAN IMMUNODEFICIENCY VIRUS
WGLHTGERDWH

SEQ ID NO: 10597 - protein, 11 aa, HUMAN IMMUNODEFICIENCY VIRUS
VSPRCEYQAGH

SEQ ID NO: 10598 - protein, 11 aa, HUMAN IMMUNODEFICIENCY VIRUS
LTEDRWNKPQK

SEQ ID NO: 10599 - protein, 8 aa, HUMAN IMMUNODEFICIENCY VIRUS
GSHTMNGH

SEQ ID NO: 10600 - protein, 9 aa, HUMAN IMMUNODEFICIENCY VIRUS
RGSHTMNGH

SEQ ID NO: 10601 - protein, 11 aa, HUMAN IMMUNODEFICIENCY VIRUS
TTYWGLHTGER

SEQ ID NO: 10602 - protein, 11 aa, HUMAN IMMUNODEFICIENCY VIRUS
HLGHGVSIEWR

SEQ ID NO: 10603 - protein, 11 aa, HUMAN IMMUNODEFICIENCY VIRUS
SSEVHIPLGDA

SEQ ID NO: 10604 - protein, 9 aa, HUMAN IMMUNODEFICIENCY VIRUS
NSLVKHHMY

SEQ ID NO: 10605 - protein, 9 aa, HUMAN IMMUNODEFICIENCY VIRUS
EVHIPLGDA

SEQ ID NO: 10606 - protein, 8 aa, HUMAN IMMUNODEFICIENCY VIRUS
QGVSIEWR

SEQ ID NO: 10607 - protein, 9 aa, HUMAN IMMUNODEFICIENCY VIRUS
EVHIPLGEA

SEQ ID NO: 10608 - protein, 10 aa, HUMAN IMMUNODEFICIENCY VIRUS
LGQGVSIEWR

SEQ ID NO: 10609 - protein, 11 aa, HUMAN IMMUNODEFICIENCY VIRUS
SSEVHIPLGEA

SEQ ID NO: 10610 - protein, 11 aa, HUMAN IMMUNODEFICIENCY VIRUS
HLGQGVSIEWR

SEQ ID NO: 10611 - protein, 8 aa, HUMAN IMMUNODEFICIENCY VIRUS
RCEYQAGH

SEQ ID NO: 10612 - protein, 9 aa, HUMAN IMMUNODEFICIENCY VIRUS
RTWNSLVKH

SEQ ID NO: 10613 - protein, 10 aa, HUMAN IMMUNODEFICIENCY VIRUS
RTWNSLVKHH

SEQ ID NO: 10614 - protein, 8 aa, HUMAN IMMUNODEFICIENCY VIRUS
RTWNSLVK

SEQ ID NO: 10615 - protein, 8 aa, HUMAN IMMUNODEFICIENCY VIRUS
HGVSIEWR

SEQ ID NO: 10616 - protein, 8 aa, HUMAN IMMUNODEFICIENCY VIRUS
GLADQLIH

SEQ ID NO: 10617 - protein, 9 aa, HUMAN IMMUNODEFICIENCY VIRUS
PGLADQLIH

SEQ ID NO: 10618 - protein, 10 aa, HUMAN IMMUNODEFICIENCY VIRUS
LGHGVSIEWR

SEQ ID NO: 10619 - protein, 11 aa, HUMAN IMMUNODEFICIENCY VIRUS
YFDCFSESAIR

SEQ ID NO: 10620 - protein, 8 aa, HUMAN IMMUNODEFICIENCY VIRUS
WGLHTGER

SEQ ID NO: 10621 - protein, 9 aa, HUMAN IMMUNODEFICIENCY VIRUS
YFDCFSESA

SEQ ID NO: 10622 - protein, 9 aa, HUMAN IMMUNODEFICIENCY VIRUS
DCFSESAIR

SEQ ID NO: 10623 - protein, 10 aa, HUMAN IMMUNODEFICIENCY VIRUS
FDCFSESAIR

SEQ ID NO: 10624 - protein, 8 aa, HUMAN IMMUNODEFICIENCY VIRUS
FDCFSESA

SEQ ID NO: 10625 - protein, 8 aa, HUMAN IMMUNODEFICIENCY VIRUS
CFSESAIR

SEQ ID NO: 10626 - protein, 9 aa, HUMAN IMMUNODEFICIENCY VIRUS
KLTEDRWNK

SEQ ID NO: 10627 - protein, 11 aa, HUMAN IMMUNODEFICIENCY VIRUS
VGSLQYLALTA

SEQ ID NO: 10628 - protein, 8 aa, HUMAN IMMUNODEFICIENCY VIRUS
LTEDRWNK

SEQ ID NO: 10629 - protein, 9 aa, HUMAN IMMUNODEFICIENCY VIRUS
SLQYLALTA

SEQ ID NO: 10630 - protein, 10 aa, HUMAN IMMUNODEFICIENCY VIRUS
GSLQYLALTA

SEQ ID NO: 10631 - protein, 11 aa, HUMAN IMMUNODEFICIENCY VIRUS
IVWQVDRMRIR

SEQ ID NO: 10632 - protein, 8 aa, HUMAN IMMUNODEFICIENCY VIRUS
QVDRMRIR

SEQ ID NO: 10633 - protein, 9 aa, HUMAN IMMUNODEFICIENCY VIRUS
EDRWNKPQK

SEQ ID NO: 10634 - protein, 11 aa, HUMAN IMMUNODEFICIENCY VIRUS
VMIVWQVDRMR

SEQ ID NO: 10635 - protein, 10 aa, HUMAN IMMUNODEFICIENCY VIRUS
QVMIVWQVDR

SEQ ID NO: 10636 - protein, 10 aa, HUMAN IMMUNODEFICIENCY VIRUS
MIVWQVDRMR

SEQ ID NO: 10637 - protein, 11 aa, HUMAN IMMUNODEFICIENCY VIRUS
AGHNKVGSLQY

SEQ ID NO: 10638 - protein, 8 aa, HUMAN IMMUNODEFICIENCY VIRUS
SLVKHHMY

SEQ ID NO: 10639 - protein, 9 aa, HUMAN IMMUNODEFICIENCY VIRUS
VMIVWQVDR

SEQ ID NO: 10640 - protein, 8 aa, HUMAN IMMUNODEFICIENCY VIRUS
MIVWQVDR

SEQ ID NO: 10641 - protein, 9 aa, HUMAN IMMUNODEFICIENCY VIRUS
IVWQVDRMR

SEQ ID NO: 10642 - protein, 9 aa, HUMAN IMMUNODEFICIENCY VIRUS
KVGSLQYLA

SEQ ID NO: 10643 - protein, 8 aa, HUMAN IMMUNODEFICIENCY VIRUS
VGSLQYLA

SEQ ID NO: 10644 - protein, 7 aa, HUMAN IMMUNODEFICIENCY VIRUS
LPGRRGR

SEQ ID NO: 10645 - protein, 8 aa, HUMAN IMMUNODEFICIENCY VIRUS
NIRGRRVR

SEQ ID NO: 10646 - protein, 10 aa, HUMAN IMMUNODEFICIENCY VIRUS
LPGRRGRNGA

SEQ ID NO: 10647 - protein, 10 aa, HUMAN IMMUNODEFICIENCY VIRUS
WALELLEELK

SEQ ID NO: 10648 - protein, 8 aa, HUMAN IMMUNODEFICIENCY VIRUS
QLLFVHFR

SEQ ID NO: 10649 - protein, 8 aa, HUMAN IMMUNODEFICIENCY VIRUS
HSRIGIIR

SEQ ID NO: 10650 - protein, 8 aa, HUMAN IMMUNODEFICIENCY VIRUS
RIGITRQR

SEQ ID NO: 10651 - protein, 8 aa, HUMAN IMMUNODEFICIENCY VIRUS
IGITRQRR

SEQ ID NO: 10652 - protein, 9 aa, HUMAN IMMUNODEFICIENCY VIRUS
ALELLEELK

SEQ ID NO: 10653 - protein, 9 aa, HUMAN IMMUNODEFICIENCY VIRUS
RIGITRQRR

SEQ ID NO: 10654 - protein, 10 aa, HUMAN IMMUNODEFICIENCY VIRUS
HSRIGITRQR

SEQ ID NO: 10655 - protein, 11 aa, HUMAN IMMUNODEFICIENCY VIRUS
HSRIGITRQRR

SEQ ID NO: 10656 - protein, 8 aa, HUMAN IMMUNODEFICIENCY VIRUS
WLHGLGQY

SEQ ID NO: 10657 - protein, 8 aa, HUMAN IMMUNODEFICIENCY VIRUS
HFRIGCRH

SEQ ID NO: 10658 - protein, 8 aa, HUMAN IMMUNODEFICIENCY VIRUS
HSRIGITR

SEQ ID NO: 10659 - protein, 9 aa, HUMAN IMMUNODEFICIENCY VIRUS
FIHFRIGCR

SEQ ID NO: 10660 - protein, 10 aa, HUMAN IMMUNODEFICIENCY VIRUS
LFIHFRIGCR

SEQ ID NO: 10661 - protein, 10 aa, HUMAN IMMUNODEFICIENCY VIRUS
FIHFRIGCRH

SEQ ID NO: 10662 - protein, 10 aa, HUMAN IMMUNODEFICIENCY VIRUS
FVHFRIGCQH

SEQ ID NO: 10663 - protein, 10 aa, HUMAN IMMUNODEFICIENCY VIRUS
HFRIGCRHSR

SEQ ID NO: 10664 - protein, 11 aa, HUMAN IMMUNODEFICIENCY VIRUS
LLFIHFRIGCR

SEQ ID NO: 10665 - protein, 11 aa, HUMAN IMMUNODEFICIENCY VIRUS
LFIHFRIGCRH

SEQ ID NO: 10666 - protein, 11 aa, HUMAN IMMUNODEFICIENCY VIRUS
LFVHFRIGCQH

SEQ ID NO: 10667 - protein, 8 aa, HUMAN IMMUNODEFICIENCY VIRUS
RIGCRHSR

SEQ ID NO: 10668 - protein, 9 aa, HUMAN IMMUNODEFICIENCY VIRUS
LGQHIYNTY

SEQ ID NO: 10669 - protein, 9 aa, HUMAN IMMUNODEFICIENCY VIRUS
LGQYIYETY

SEQ ID NO: 10670 - protein, 8 aa, HUMAN IMMUNODEFICIENCY VIRUS
HFPRIWLH

SEQ ID NO: 10671 - protein, 10 aa, HUMAN IMMUNODEFICIENCY VIRUS
KSEAVRHFPR

SEQ ID NO: 10672 - protein, 11 aa, HUMAN IMMUNODEFICIENCY VIRUS
AVRHFPRIWLH

SEQ ID NO: 10673 - protein, 8 aa, HUMAN IMMUNODEFICIENCY VIRUS
KSEAVRHF

SEQ ID NO: 10674 - protein, 10 aa, HUMAN IMMUNODEFICIENCY VIRUS
ELKSEAVRHF

SEQ ID NO: 10675 - protein, 8 aa, HUMAN IMMUNODEFICIENCY VIRUS
ELKSEAVR

SEQ ID NO: 10676 - protein, 8 aa, HUMAN IMMUNODEFICIENCY VIRUS
ETYGDTWA

SEQ ID NO: 10677 - protein, 8 aa, HUMAN IMMUNODEFICIENCY VIRUS
DTWAGVEA

SEQ ID NO: 10678 - protein, 8 aa, HUMAN IMMUNODEFICIENCY VIRUS
AGVEAIIR

SEQ ID NO: 10679 - protein, 9 aa, HUMAN IMMUNODEFICIENCY VIRUS
LLEELKSEA

SEQ ID NO: 10680 - protein, 9 aa, HUMAN IMMUNODEFICIENCY VIRUS
ELKSEAVRH

SEQ ID NO: 10681 - protein, 9 aa, HUMAN IMMUNODEFICIENCY VIRUS
GDTWAGVEA

SEQ ID NO: 10682 - protein, 9 aa, HUMAN IMMUNODEFICIENCY VIRUS
WAGVEAIIR

SEQ ID NO: 10683 - protein, 10 aa, HUMAN IMMUNODEFICIENCY VIRUS
ELLEELKNEA

SEQ ID NO: 10684 - protein, 10 aa, HUMAN IMMUNODEFICIENCY VIRUS
ELLEELKSEA

SEQ ID NO: 10685 - protein, 10 aa, HUMAN IMMUNODEFICIENCY VIRUS
YGDTWAGVEA

SEQ ID NO: 10686 - protein, 11 aa, HUMAN IMMUNODEFICIENCY VIRUS
LLEELKSEAVR

SEQ ID NO: 10687 - protein, 11 aa, HUMAN IMMUNODEFICIENCY VIRUS
DTWAGVEAIIR

SEQ ID NO: 10688 - protein, 8 aa, HUMAN IMMUNODEFICIENCY VIRUS
ELKNEAVR

SEQ ID NO: 10689 - protein, 9 aa, HUMAN IMMUNODEFICIENCY VIRUS
LLEELKNEA

SEQ ID NO: 10690 - protein, 9 aa, HUMAN IMMUNODEFICIENCY VIRUS
ELKNEAVRH

SEQ ID NO: 10691 - protein, 9 aa, HUMAN IMMUNODEFICIENCY VIRUS
LGQHIYETY

SEQ ID NO: 10692 - protein, 10 aa, HUMAN IMMUNODEFICIENCY VIRUS
ELKNEAVRHF

SEQ ID NO: 10693 - protein, 11 aa, HUMAN IMMUNODEFICIENCY VIRUS
LLEELKNEAVR

SEQ ID NO: 10694 - protein, 8 aa, HUMAN IMMUNODEFICIENCY VIRUS
EGVEAIIR

SEQ ID NO: 10695 - protein, 11 aa, HUMAN IMMUNODEFICIENCY VIRUS
DTWEGVEAIIR

SEQ ID NO: 10696 - protein, 8 aa, HUMAN IMMUNODEFICIENCY VIRUS
RARNGASR

SEQ ID NO: 10697 - protein, 8 aa, HUMAN IMMUNODEFICIENCY VIRUS
WLHGLGQH

SEQ ID NO: 10698 - protein, 8 aa, HUMAN IMMUNODEFICIENCY VIRUS
HGLGQHIY

SEQ ID NO: 10699 - protein, 10 aa, HUMAN IMMUNODEFICIENCY VIRUS
WLHGLGQHIY

SEQ ID NO: 10700 - protein, 8 aa, HUMAN IMMUNODEFICIENCY VIRUS
DTWEGVEA

SEQ ID NO: 10701 - protein, 9 aa, HUMAN IMMUNODEFICIENCY VIRUS
GDTWEGVEA

SEQ ID NO: 10702 - protein, 10 aa, HUMAN IMMUNODEFICIENCY VIRUS
YGDTWEGVEA

SEQ ID NO: 10703 - protein, 11 aa, HUMAN IMMUNODEFICIENCY VIRUS
LFIHFRIGCQH

SEQ ID NO: 10704 - protein, 10 aa, HUMAN IMMUNODEFICIENCY VIRUS
FIHFRIGCQH

SEQ ID NO: 10705 - protein, 8 aa, HUMAN IMMUNODEFICIENCY VIRUS
HFPRPWLH

SEQ ID NO: 10706 - protein, 11 aa, HUMAN IMMUNODEFICIENCY VIRUS
AVRHFPRPWLH

SEQ ID NO: 10707 - protein, 11 aa, HUMAN IMMUNODEFICIENCY VIRUS
RILQQLLFIHF

SEQ ID NO: 10708 - protein, 10 aa, HUMAN IMMUNODEFICIENCY VIRUS
ILQQLLFIHF

SEQ ID NO: 10709 - protein, 11 aa, HUMAN IMMUNODEFICIENCY VIRUS
ILQQLLFIHFR

SEQ ID NO: 10710 - protein, 10 aa, HUMAN IMMUNODEFICIENCY VIRUS
RILQQLLFIH

SEQ ID NO: 10711 - protein, 9 aa, HUMAN IMMUNODEFICIENCY VIRUS
ILQQLLFIH

SEQ ID NO: 10712 - protein, 10 aa, HUMAN IMMUNODEFICIENCY VIRUS
EDQGPQREPY

SEQ ID NO: 10713 - protein, 11 aa, HUMAN IMMUNODEFICIENCY VIRUS
AIIRILQQLLF

SEQ ID NO: 10714 - protein, 10 aa, HUMAN IMMUNODEFICIENCY VIRUS
QAPEDQGPQR

SEQ ID NO: 10715 - protein, 10 aa, HUMAN IMMUNODEFICIENCY VIRUS
IIRILQQLLF

SEQ ID NO: 10716 - protein, 10 aa, HUMAN IMMUNODEFICIENCY VIRUS
WTLELLEELK

SEQ ID NO: 10717 - protein, 8 aa, HUMAN IMMUNODEFICIENCY VIRUS
QGPQREPY

SEQ ID NO: 10718 - protein, 8 aa, HUMAN IMMUNODEFICIENCY VIRUS
QLLFIHFR

SEQ ID NO: 10719 - protein, 8 aa, HUMAN IMMUNODEFICIENCY VIRUS
HFRIGCQH

SEQ ID NO: 10720 - protein, 9 aa, HUMAN IMMUNODEFICIENCY VIRUS
TLELLEELK

SEQ ID NO: 10721 - protein, 10 aa, HUMAN IMMUNODEFICIENCY VIRUS
HFRIGCQHSR

SEQ ID NO: 10722 - protein, 8 aa, HUMAN IMMUNODEFICIENCY VIRUS
RILQQLLF

SEQ ID NO: 10723 - protein, 8 aa, HUMAN IMMUNODEFICIENCY VIRUS
RIGCQHSR

SEQ ID NO: 10724 - protein, 8 aa, HUMAN IMMUNODEFICIENCY VIRUS
EAVRHFPR

SEQ ID NO: 10725 - protein, 9 aa, HUMAN IMMUNODEFICIENCY VIRUS
IDYRLGVGA

SEQ ID NO: 10726 - protein, 9 aa, HUMAN IMMUNODEFICIENCY VIRUS
VDYRIVIVA

SEQ ID NO: 10727 - protein, 9 aa, HUMAN IMMUNODEFICIENCY VIRUS
VDYRLGVGA

SEQ ID NO: 10728 - protein, 10 aa, HUMAN IMMUNODEFICIENCY VIRUS
KVDYRIVIVA

SEQ ID NO: 10729 - protein, 10 aa, HUMAN IMMUNODEFICIENCY VIRUS
KVDYRLGVGA

SEQ ID NO: 10730 - protein, 10 aa, HUMAN IMMUNODEFICIENCY VIRUS
RIDYRLGVGA

SEQ ID NO: 10731 - protein, 10 aa, HUMAN IMMUNODEFICIENCY VIRUS
VDYRIVIVAF

SEQ ID NO: 10732 - protein, 11 aa, HUMAN IMMUNODEFICIENCY VIRUS
KVDYRIVIVAF

SEQ ID NO: 10733 - protein, 8 aa, HUMAN IMMUNODEFICIENCY VIRUS
LVQRKQDR

SEQ ID NO: 10734 - protein, 8 aa, HUMAN IMMUNODEFICIENCY VIRUS
GVEMGHHA

SEQ ID NO: 10735 - protein, 8 aa, HUMAN IMMUNODEFICIENCY VIRUS
VTLLSSSK

SEQ ID NO: 10736 - protein, 9 aa, HUMAN IMMUNODEFICIENCY VIRUS
LVQRKQDRR

SEQ ID NO: 10737 - protein, 9 aa, HUMAN IMMUNODEFICIENCY VIRUS
LVTLLSSSK

SEQ ID NO: 10738 - protein, 11 aa, HUMAN IMMUNODEFICIENCY VIRUS
RIKEIRDDSDY

SEQ ID NO: 10739 - protein, 11 aa, HUMAN IMMUNODEFICIENCY VIRUS
RIREIRDDSDY

SEQ ID NO: 10740 - protein, 9 aa, HUMAN IMMUNODEFICIENCY VIRUS
LAIVALVVA

SEQ ID NO: 10741 - protein, 9 aa, HUMAN IMMUNODEFICIENCY VIRUS
WTIVFIEYR

SEQ ID NO: 10742 - protein, 8 aa, HUMAN IMMUNODEFICIENCY VIRUS
TIVFIEYR

SEQ ID NO: 10743 - protein, 9 aa, HUMAN IMMUNODEFICIENCY VIRUS
IDRLIDRIR

SEQ ID NO: 10744 - protein, 9 aa, HUMAN IMMUNODEFICIENCY VIRUS
RLIDRIRER

SEQ ID NO: 10745 - protein, 10 aa, HUMAN IMMUNODEFICIENCY VIRUS
KIDRLIDRIR

SEQ ID NO: 10746 - protein, 11 aa, HUMAN IMMUNODEFICIENCY VIRUS
VVWTIVFIEYR

SEQ ID NO: 10747 - protein, 11 aa, HUMAN IMMUNODEFICIENCY VIRUS
ESEGDQEELSA

SEQ ID NO: 10748 - protein, 9 aa, HUMAN IMMUNODEFICIENCY VIRUS
EGDQEELSA

SEQ ID NO: 10749 - protein, 8 aa, HUMAN IMMUNODEFICIENCY VIRUS
WTIVFIEY

SEQ ID NO: 10750 - protein, 8 aa, HUMAN IMMUNODEFICIENCY VIRUS
AIVALVVA

SEQ ID NO: 10751 - protein, 8 aa, HUMAN IMMUNODEFICIENCY VIRUS
IVFIEYRK

SEQ ID NO: 10752 - protein, 8 aa, HUMAN IMMUNODEFICIENCY VIRUS
IDRIRERA

SEQ ID NO: 10753 - protein, 9 aa, HUMAN IMMUNODEFICIENCY VIRUS
LIDRIRERA

SEQ ID NO: 10754 - protein, 10 aa, HUMAN IMMUNODEFICIENCY VIRUS
VVWTIVFIEY

SEQ ID NO: 10755 - protein, 11 aa, HUMAN IMMUNODEFICIENCY VIRUS
IVVWTIVFIEY

SEQ ID NO: 10756 - protein, 8 aa, HUMAN IMMUNODEFICIENCY VIRUS
GDQEELSA

SEQ ID NO: 10757 - protein, 8 aa, HUMAN IMMUNODEFICIENCY VIRUS
LIDRIRER

SEQ ID NO: 10758 - protein, 9 aa, HUMAN IMMUNODEFICIENCY VIRUS
AIVVWTIVF

SEQ ID NO: 10759 - protein, 8 aa, HUMAN IMMUNODEFICIENCY VIRUS
IVVWTIVF

SEQ ID NO: 10760 - protein, 8 aa, HUMAN IMMUNODEFICIENCY VIRUS
KIDRLIDR

SEQ ID NO: 10761 - protein, 9 aa, HUMAN IMMUNODEFICIENCY VIRUS
ILRQRKIDR

SEQ ID NO: 10762 - protein, 10 aa, HUMAN IMMUNODEFICIENCY VIRUS
KILRQRKIDR

SEQ ID NO: 10763 - protein, 8 aa, HUMAN IMMUNODEFICIENCY VIRUS
IGPGQTFY

SEQ ID NO: 10764 - protein, 8 aa, HUMAN IMMUNODEFICIENCY VIRUS
IGSGQAFY

SEQ ID NO: 10765 - protein, 8 aa, HUMAN IMMUNODEFICIENCY VIRUS
GTAGNSSR

SEQ ID NO: 10766 - protein, 8 aa, HUMAN IMMUNODEFICIENCY VIRUS
NNTSPRSR

SEQ ID NO: 10767 - protein, 9 aa, HUMAN IMMUNODEFICIENCY VIRUS
ADNLWVTVY

SEQ ID NO: 10768 - protein, 9 aa, HUMAN IMMUNODEFICIENCY VIRUS
GIGPGQTFY

SEQ ID NO: 10769 - protein, 9 aa, HUMAN IMMUNODEFICIENCY VIRUS
SIGSGQAFY

SEQ ID NO: 10770 - protein, 10 aa, HUMAN IMMUNODEFICIENCY VIRUS
ADNLWVTVYY

SEQ ID NO: 10771 - protein, 10 aa, HUMAN IMMUNODEFICIENCY VIRUS
EGKNEINDTY

SEQ ID NO: 10772 - protein, 10 aa, HUMAN IMMUNODEFICIENCY VIRUS
NTSPRSRVAY

SEQ ID NO: 10773 - protein, 10 aa, HUMAN IMMUNODEFICIENCY VIRUS
TAGNSSRAAY

SEQ ID NO: 10774 - protein, 11 aa, HUMAN IMMUNODEFICIENCY VIRUS
GTAGNSSRAAY

SEQ ID NO: 10775 - protein, 11 aa, HUMAN IMMUNODEFICIENCY VIRUS
NNTSPRSRVAY

SEQ ID NO: 10776 - protein, 11 aa, HUMAN IMMUNODEFICIENCY VIRUS
KLREIRQFENK

SEQ ID NO: 10777 - protein, 8 aa, HUMAN IMMUNODEFICIENCY VIRUS
KNNTETNK

SEQ ID NO: 10778 - protein, 8 aa, HUMAN IMMUNODEFICIENCY VIRUS
IINIHTPH

SEQ ID NO: 10779 - protein, 8 aa, HUMAN IMMUNODEFICIENCY VIRUS
VISTRTHR

SEQ ID NO: 10780 - protein, 8 aa, HUMAN IMMUNODEFICIENCY VIRUS
INIHTPHR

SEQ ID NO: 10781 - protein, 8 aa, HUMAN IMMUNODEFICIENCY VIRUS
STRTHREK

SEQ ID NO: 10782 - protein, 9 aa, HUMAN IMMUNODEFICIENCY VIRUS
SNNTSPRSR

SEQ ID NO: 10783 - protein, 9 aa, HUMAN IMMUNODEFICIENCY VIRUS
NANITIPCR

SEQ ID NO: 10784 - protein, 9 aa, HUMAN IMMUNODEFICIENCY VIRUS
IINIHTPHR

SEQ ID NO: 10785 - protein, 9 aa, HUMAN IMMUNODEFICIENCY VIRUS
ISTRTHREK

SEQ ID NO: 10786 - protein, 9 aa, HUMAN IMMUNODEFICIENCY VIRUS
NIHTPHREK

SEQ ID NO: 10787 - protein, 9 aa, HUMAN IMMUNODEFICIENCY VIRUS
STRTHREKR

SEQ ID NO: 10788 - protein, 10 aa, HUMAN IMMUNODEFICIENCY VIRUS
VISTRTHREK

SEQ ID NO: 10789 - protein, 10 aa, HUMAN IMMUNODEFICIENCY VIRUS
INIHTPHREK

SEQ ID NO: 10790 - protein, 10 aa, HUMAN IMMUNODEFICIENCY VIRUS
ISTRTHREKR

SEQ ID NO: 10791 - protein, 10 aa, HUMAN IMMUNODEFICIENCY VIRUS
NIHTPHREKR

SEQ ID NO: 10792 - protein, 11 aa, HUMAN IMMUNODEFICIENCY VIRUS
HTEGNITLQCR

SEQ ID NO: 10793 - protein, 11 aa, HUMAN IMMUNODEFICIENCY VIRUS
NANITIPCRIK

SEQ ID NO: 10794 - protein, 11 aa, HUMAN IMMUNODEFICIENCY VIRUS
GNSTNGTETFR

SEQ ID NO: 10795 - protein, 11 aa, HUMAN IMMUNODEFICIENCY VIRUS
IINIHTPHREK

SEQ ID NO: 10796 - protein, 11 aa, HUMAN IMMUNODEFICIENCY VIRUS
VISTRTHREKR

SEQ ID NO: 10797 - protein, 11 aa, HUMAN IMMUNODEFICIENCY VIRUS
INIHTPHREKR

SEQ ID NO: 10798 - protein, 9 aa, HUMAN IMMUNODEFICIENCY VIRUS
DSSNSTGNY

SEQ ID NO: 10799 - protein, 9 aa, HUMAN IMMUNODEFICIENCY VIRUS
STNGTETFR

SEQ ID NO: 10800 - protein, 10 aa, HUMAN IMMUNODEFICIENCY VIRUS
TNSSYTNDTY

SEQ ID NO: 10801 - protein, 11 aa, HUMAN IMMUNODEFICIENCY VIRUS
NDTENNTEIFR

SEQ ID NO: 10802 - protein, 11 aa, HUMAN IMMUNODEFICIENCY VIRUS
NTETNKTETFR

SEQ ID NO: 10803 - protein, 11 aa, HUMAN IMMUNODEFICIENCY VIRUS
NTTGNTTETFR

SEQ ID NO: 10804 - protein, 11 aa, HUMAN IMMUNODEFICIENCY VIRUS
NGSENGTETFR

SEQ ID NO: 10805 - protein, 10 aa, HUMAN IMMUNODEFICIENCY VIRUS
GSENGTETFR

SEQ ID NO: 10806 - protein, 9 aa, HUMAN IMMUNODEFICIENCY VIRUS
NDTITLPCR

SEQ ID NO: 10807 - protein, 11 aa, HUMAN IMMUNODEFICIENCY VIRUS
NDTITLPCRIK

SEQ ID NO: 10808 - protein, 8 aa, HUMAN IMMUNODEFICIENCY VIRUS
RGWEALKY

SEQ ID NO: 10809 - protein, 11 aa, HUMAN IMMUNODEFICIENCY VIRUS
KGLRLGWEGLK

SEQ ID NO: 10810 - protein, 8 aa, HUMAN IMMUNODEFICIENCY VIRUS
LGWEGLKY

SEQ ID NO: 10811 - protein, 9 aa, HUMAN IMMUNODEFICIENCY VIRUS
RLGWEGLKY

SEQ ID NO: 10812 - protein, 11 aa, HUMAN IMMUNODEFICIENCY VIRUS
GLRLGWEGLKY

SEQ ID NO: 10813 - protein, 10 aa, HUMAN IMMUNODEFICIENCY VIRUS
LGRRGWEALK

SEQ ID NO: 10814 - protein, 11 aa, HUMAN IMMUNODEFICIENCY VIRUS
LLGRRGWEALK

SEQ ID NO: 10815 - protein, 8 aa, HUMAN IMMUNODEFICIENCY VIRUS
RLGWEGLK

SEQ ID NO: 10816 - protein, 10 aa, HUMAN IMMUNODEFICIENCY VIRUS
GLRLGWEGLK

SEQ ID NO: 10817 - protein, 8 aa, HUMAN IMMUNODEFICIENCY VIRUS
ENLWVTVY

SEQ ID NO: 10818 - protein, 9 aa, HUMAN IMMUNODEFICIENCY VIRUS
ENLWVTVYY

SEQ ID NO: 10819 - protein, 10 aa, HUMAN IMMUNODEFICIENCY VIRUS
DIIGDIRQAH

SEQ ID NO: 10820 - protein, 8 aa, HUMAN IMMUNODEFICIENCY VIRUS
NNTRKSIR

SEQ ID NO: 10821 - protein, 8 aa, HUMAN IMMUNODEFICIENCY VIRUS
PLGVAPTR

SEQ ID NO: 10822 - protein, 8 aa, HUMAN IMMUNODEFICIENCY VIRUS
DITNWLWY

SEQ ID NO: 10823 - protein, 8 aa, HUMAN IMMUNODEFICIENCY VIRUS
DFILIAAR

SEQ ID NO: 10824 - protein, 9 aa, HUMAN IMMUNODEFICIENCY VIRUS
STITQACPK

SEQ ID NO: 10825 - protein, 9 aa, HUMAN IMMUNODEFICIENCY VIRUS
FDITNWLWY

SEQ ID NO: 10826 - protein, 9 aa, HUMAN IMMUNODEFICIENCY VIRUS
RDFILIAAR

SEQ ID NO: 10827 - protein, 10 aa, HUMAN IMMUNODEFICIENCY VIRUS
FAILKCNDKK

SEQ ID NO: 10828 - protein, 10 aa, HUMAN IMMUNODEFICIENCY VIRUS
MLQLTVWGIK

SEQ ID NO: 10829 - protein, 10 aa, HUMAN IMMUNODEFICIENCY VIRUS
RVLAVERYLR

SEQ ID NO: 10830 - protein, 10 aa, HUMAN IMMUNODEFICIENCY VIRUS
WFDITNWLWY

SEQ ID NO: 10831 - protein, 10 aa, HUMAN IMMUNODEFICIENCY VIRUS
EGIEEEGGER

SEQ ID NO: 10832 - protein, 11 aa, HUMAN IMMUNODEFICIENCY VIRUS
GFAILKCNDKK

SEQ ID NO: 10833 - protein, 11 aa, HUMAN IMMUNODEFICIENCY VIRUS
GDIIGDIRQAH

SEQ ID NO: 10834 - protein, 11 aa, HUMAN IMMUNODEFICIENCY VIRUS
NVPWNSSWSNK

SEQ ID NO: 10835 - protein, 11 aa, HUMAN IMMUNODEFICIENCY VIRUS
WMEWEREIDNY

SEQ ID NO: 10836 - protein, 11 aa, HUMAN IMMUNODEFICIENCY VIRUS
IAIAVAEGTDR

SEQ ID NO: 10837 - protein, 8 aa, HUMAN IMMUNODEFICIENCY VIRUS
RGWEALKY

SEQ ID NO: 10838 - protein, 8 aa, HUMAN IMMUNODEFICIENCY VIRUS
KLWVTVYY

SEQ ID NO: 10839 - protein, 8 aa, HUMAN IMMUNODEFICIENCY VIRUS
WNSSWSNR

SEQ ID NO: 10840 - protein, 8 aa, HUMAN IMMUNODEFICIENCY VIRUS
TITQACPK

SEQ ID NO: 10841 - protein, 8 aa, HUMAN IMMUNODEFICIENCY VIRUS
IGPGQTFY

SEQ ID NO: 10842 - protein, 8 aa, HUMAN IMMUNODEFICIENCY VIRUS
LAVERYLR

SEQ ID NO: 10843 - protein, 8 aa, HUMAN IMMUNODEFICIENCY VIRUS
SNWLWYIK

SEQ ID NO: 10844 - protein, 8 aa, HUMAN IMMUNODEFICIENCY VIRUS
NLCLFSYH

SEQ ID NO: 10845 - protein, 9 aa, HUMAN IMMUNODEFICIENCY VIRUS
RIGPGQTFY

SEQ ID NO: 10846 - protein, 9 aa, HUMAN IMMUNODEFICIENCY VIRUS
ITTHSFNCR

SEQ ID NO: 10847 - protein, 9 aa, HUMAN IMMUNODEFICIENCY VIRUS
NITLPCRIK

SEQ ID NO: 10848 - protein, 9 aa, HUMAN IMMUNODEFICIENCY VIRUS
VLAVERYLR

SEQ ID NO: 10849 - protein, 9 aa, HUMAN IMMUNODEFICIENCY VIRUS
ISNWLWYIK

SEQ ID NO: 10850 - protein, 9 aa, HUMAN IMMUNODEFICIENCY VIRUS
RNLCLFSYH

SEQ ID NO: 10851 - protein, 9 aa, HUMAN IMMUNODEFICIENCY VIRUS
NLCLFSYHR

SEQ ID NO: 10852 - protein, 10 aa, HUMAN IMMUNODEFICIENCY VIRUS
EITTHSFNCR

SEQ ID NO: 10853 - protein, 10 aa, HUMAN IMMUNODEFICIENCY VIRUS
RNLCLFSYHR

SEQ ID NO: 10854 - protein, 11 aa, HUMAN IMMUNODEFICIENCY VIRUS
YATGDIIGDIR

SEQ ID NO: 10855 - protein, 11 aa, HUMAN IMMUNODEFICIENCY VIRUS
DLRNLCLFSYH

SEQ ID NO: 10856 - protein, 11 aa, HUMAN IMMUNODEFICIENCY VIRUS
NLCLFSYHRLR

SEQ ID NO: 10857 - protein, 8 aa, HUMAN IMMUNODEFICIENCY VIRUS
GNLWVTVY

SEQ ID NO: 10858 - protein, 9 aa, HUMAN IMMUNODEFICIENCY VIRUS
GNLWVTVYY

SEQ ID NO: 10859 - protein, 9 aa, HUMAN IMMUNODEFICIENCY VIRUS
TGDIIGDIR

SEQ ID NO: 10860 - protein, 8 aa, HUMAN IMMUNODEFICIENCY VIRUS
EAQQHLLK

SEQ ID NO: 10861 - protein, 8 aa, HUMAN IMMUNODEFICIENCY VIRUS
ILKCNDKK

SEQ ID NO: 10862 - protein, 8 aa, HUMAN IMMUNODEFICIENCY VIRUS
TTHSFNCR

SEQ ID NO: 10863 - protein, 8 aa, HUMAN IMMUNODEFICIENCY VIRUS
MTWMEWER

SEQ ID NO: 10864 - protein, 8 aa, HUMAN IMMUNODEFICIENCY VIRUS
GGERDRDR

SEQ ID NO: 10865 - protein, 9 aa, HUMAN IMMUNODEFICIENCY VIRUS
AILKCNDKK

SEQ ID NO: 10866 - protein, 9 aa, HUMAN IMMUNODEFICIENCY VIRUS
LAEEEVVIR

SEQ ID NO: 10867 - protein, 9 aa, HUMAN IMMUNODEFICIENCY VIRUS
INMWQEVGK

SEQ ID NO: 10868 - protein, 9 aa, HUMAN IMMUNODEFICIENCY VIRUS
NMTWMEWER

SEQ ID NO: 10869 - protein, 9 aa, HUMAN IMMUNODEFICIENCY VIRUS
GIEEEGGER

SEQ ID NO: 10870 - protein, 9 aa, HUMAN IMMUNODEFICIENCY VIRUS
EGGERDRDR

SEQ ID NO: 10871 - protein, 10 aa, HUMAN IMMUNODEFICIENCY VIRUS
SLAEEEVVIR

SEQ ID NO: 10872 - protein, 10 aa, HUMAN IMMUNODEFICIENCY VIRUS
ATGDIIGDIR

SEQ ID NO: 10873 - protein, 10 aa, HUMAN IMMUNODEFICIENCY VIRUS
IINMWQEVGK

SEQ ID NO: 10874 - protein, 10 aa, HUMAN IMMUNODEFICIENCY VIRUS
AIEAQQHLLK

SEQ ID NO: 10875 - protein, 10 aa, HUMAN IMMUNODEFICIENCY VIRUS
LLQYWSQELK

SEQ ID NO: 10876 - protein, 10 aa, HUMAN IMMUNODEFICIENCY VIRUS
AILHIPRRIR

SEQ ID NO: 10877 - protein, 10 aa, HUMAN IMMUNODEFICIENCY VIRUS
PTRIRQGLER

SEQ ID NO: 10878 - protein, 11 aa, HUMAN IMMUNODEFICIENCY VIRUS
KTTLFCASDAK

SEQ ID NO: 10879 - protein, 11 aa, HUMAN IMMUNODEFICIENCY VIRUS
GSLAEEEVVIR

SEQ ID NO: 10880 - protein, 11 aa, HUMAN IMMUNODEFICIENCY VIRUS
QIINMWQEVGK

SEQ ID NO: 10881 - protein, 11 aa, HUMAN IMMUNODEFICIENCY VIRUS
KNEQELLELDK

SEQ ID NO: 10882 - protein, 11 aa, HUMAN IMMUNODEFICIENCY VIRUS
GIEEEGGERDR

SEQ ID NO: 10883 - protein, 11 aa, HUMAN IMMUNODEFICIENCY VIRUS
NLLQYWSQELK

SEQ ID NO: 10884 - protein, 11 aa, HUMAN IMMUNODEFICIENCY VIRUS
RAILHIPRRIR

SEQ ID NO: 10885 - protein, 8 aa, HUMAN IMMUNODEFICIENCY VIRUS
SVEINCTR

SEQ ID NO: 10886 - protein, 8 aa, HUMAN IMMUNODEFICIENCY VIRUS
GDIIGDIR

SEQ ID NO: 10887 - protein, 8 aa, HUMAN IMMUNODEFICIENCY VIRUS
KLTVWGIK

SEQ ID NO: 10888 - protein, 8 aa, HUMAN IMMUNODEFICIENCY VIRUS
RAILHIPR

SEQ ID NO: 10889 - protein, 8 aa, HUMAN IMMUNODEFICIENCY VIRUS
AILHIPRR

SEQ ID NO: 10890 - protein, 9 aa, HUMAN IMMUNODEFICIENCY VIRUS
KAKRRVVQR

SEQ ID NO: 10891 - protein, 9 aa, HUMAN IMMUNODEFICIENCY VIRUS
RAILHIPRR

SEQ ID NO: 10892 - protein, 9 aa, HUMAN IMMUNODEFICIENCY VIRUS
ILHIPRRIR

SEQ ID NO: 10893 - protein, 10 aa, HUMAN IMMUNODEFICIENCY VIRUS
TNVSTVQCTH

SEQ ID NO: 10894 - protein, 10 aa, HUMAN IMMUNODEFICIENCY VIRUS
SGGDPEIVMH

SEQ ID NO: 10895 - protein, 10 aa, HUMAN IMMUNODEFICIENCY VIRUS
LLKLTVWGIK

SEQ ID NO: 10896 - protein, 11 aa, HUMAN IMMUNODEFICIENCY VIRUS
NTSVITQACPK

SEQ ID NO: 10897 - protein, 11 aa, HUMAN IMMUNODEFICIENCY VIRUS
CTNVSTVQCTH

SEQ ID NO: 10898 - protein, 11 aa, HUMAN IMMUNODEFICIENCY VIRUS
SSGGDLEITTH

SEQ ID NO: 10899 - protein, 11 aa, HUMAN IMMUNODEFICIENCY VIRUS
SSGGDPEIVMH

SEQ ID NO: 10900 - protein, 11 aa, HUMAN IMMUNODEFICIENCY VIRUS
PTKAKRRVVQR

SEQ ID NO: 10901 - protein, 11 aa, HUMAN IMMUNODEFICIENCY VIRUS
KAKRRVVQREK

SEQ ID NO: 10902 - protein, 11 aa, HUMAN IMMUNODEFICIENCY VIRUS
HLLKLTVWGIK

SEQ ID NO: 10903 - protein, 11 aa, HUMAN IMMUNODEFICIENCY VIRUS
KNEQDLLALDK

SEQ ID NO: 10904 - protein, 9 aa, HUMAN IMMUNODEFICIENCY VIRUS
TGEIIGDIR

SEQ ID NO: 10905 - protein, 8 aa, HUMAN IMMUNODEFICIENCY VIRUS
AITQACPK

SEQ ID NO: 10906 - protein, 8 aa, HUMAN IMMUNODEFICIENCY VIRUS
GDPEIVMH

SEQ ID NO: 10907 - protein, 8 aa, HUMAN IMMUNODEFICIENCY VIRUS
QDLLALDK

SEQ ID NO: 10908 - protein, 9 aa, HUMAN IMMUNODEFICIENCY VIRUS
SAITQACPK

SEQ ID NO: 10909 - protein, 9 aa, HUMAN IMMUNODEFICIENCY VIRUS
FAILKCNDK

SEQ ID NO: 10910 - protein, 9 aa, HUMAN IMMUNODEFICIENCY VIRUS
GGDPEIVMH

SEQ ID NO: 10911 - protein, 9 aa, HUMAN IMMUNODEFICIENCY VIRUS
TITLPCRIK

SEQ ID NO: 10912 - protein, 10 aa, HUMAN IMMUNODEFICIENCY VIRUS
TSAITQACPK

SEQ ID NO: 10913 - protein, 10 aa, HUMAN IMMUNODEFICIENCY VIRUS
TSVITQACPK

SEQ ID NO: 10914 - protein, 10 aa, HUMAN IMMUNODEFICIENCY VIRUS
GFAILKCNDK

SEQ ID NO: 10915 - protein, 10 aa, HUMAN IMMUNODEFICIENCY VIRUS
IFAVLSIVNR

SEQ ID NO: 10916 - protein, 11 aa, HUMAN IMMUNODEFICIENCY VIRUS
NTSAITQACPK

SEQ ID NO: 10917 - protein, 11 aa, HUMAN IMMUNODEFICIENCY VIRUS
AGFAILKCNDK

SEQ ID NO: 10918 - protein, 11 aa, HUMAN IMMUNODEFICIENCY VIRUS
IIFAVLSIVNR

SEQ ID NO: 10919 - protein, 11 aa, HUMAN IMMUNODEFICIENCY VIRUS
KIEPLGVAPTK

SEQ ID NO: 10920 - protein, 8 aa, HUMAN IMMUNODEFICIENCY VIRUS
FDPIPIHY

SEQ ID NO: 10921 - protein, 8 aa, HUMAN IMMUNODEFICIENCY VIRUS
PAGYAILK

SEQ ID NO: 10922 - protein, 8 aa, HUMAN IMMUNODEFICIENCY VIRUS
NMWQEVGK

SEQ ID NO: 10923 - protein, 8 aa, HUMAN IMMUNODEFICIENCY VIRUS
TNWLWYIK

SEQ ID NO: 10924 - protein, 9 aa, HUMAN IMMUNODEFICIENCY VIRUS
ITNWLWYIK

SEQ ID NO: 10925 - protein, 10 aa, HUMAN IMMUNODEFICIENCY VIRUS
SGGDLEITTH

SEQ ID NO: 10926 - protein, 10 aa, HUMAN IMMUNODEFICIENCY VIRUS
IFRPGGGDMR

SEQ ID NO: 10927 - protein, 11 aa, HUMAN IMMUNODEFICIENCY VIRUS
NMWQEVGKAMY

SEQ ID NO: 10928 - protein, 11 aa, HUMAN IMMUNODEFICIENCY VIRUS
EIFRPGGGDMR

SEQ ID NO: 10929 - protein, 11 aa, HUMAN IMMUNODEFICIENCY VIRUS
DDLRNLCLFSY

SEQ ID NO: 10930 - protein, 8 aa, HUMAN IMMUNODEFICIENCY VIRUS
FNGTGPCK

SEQ ID NO: 10931 - protein, 8 aa, HUMAN IMMUNODEFICIENCY VIRUS
RNLCLFSY

SEQ ID NO: 10932 - protein, 9 aa, HUMAN IMMUNODEFICIENCY VIRUS
ITKWLWYIK

SEQ ID NO: 10933 - protein, 10 aa, HUMAN IMMUNODEFICIENCY VIRUS
SFNCRGEFFY

SEQ ID NO: 10934 - protein, 10 aa, HUMAN IMMUNODEFICIENCY VIRUS
DLRNLCLFSY

SEQ ID NO: 10935 - protein, 11 aa, HUMAN IMMUNODEFICIENCY VIRUS
HSFNCRGEFFY

SEQ ID NO: 10936 - protein, 8 aa, HUMAN IMMUNODEFICIENCY VIRUS
WNASWSNK

SEQ ID NO: 10937 - protein, 8 aa, HUMAN IMMUNODEFICIENCY VIRUS
KAYDTEVH

SEQ ID NO: 10938 - protein, 8 aa, HUMAN IMMUNODEFICIENCY VIRUS
VITQACPK

SEQ ID NO: 10939 - protein, 8 aa, HUMAN IMMUNODEFICIENCY VIRUS
RVVQREKR

SEQ ID NO: 10940 - protein, 9 aa, HUMAN IMMUNODEFICIENCY VIRUS
SVITQACPK

SEQ ID NO: 10941 - protein, 9 aa, HUMAN IMMUNODEFICIENCY VIRUS
VAPTKAKRR

SEQ ID NO: 10942 - protein, 10 aa, HUMAN IMMUNODEFICIENCY VIRUS
DAKAYDTEVH

SEQ ID NO: 10943 - protein, 10 aa, HUMAN IMMUNODEFICIENCY VIRUS
GVAPTKAKRR

SEQ ID NO: 10944 - protein, 10 aa, HUMAN IMMUNODEFICIENCY VIRUS
VFAVLSIVNR

SEQ ID NO: 10945 - protein, 11 aa, HUMAN IMMUNODEFICIENCY VIRUS
SDAKAYDTEVH

SEQ ID NO: 10946 - protein, 11 aa, HUMAN IMMUNODEFICIENCY VIRUS
DTEVHNVWATH

SEQ ID NO: 10947 - protein, 11 aa, HUMAN IMMUNODEFICIENCY VIRUS
NCTRPNNNTRK

SEQ ID NO: 10948 - protein, 11 aa, HUMAN IMMUNODEFICIENCY VIRUS
LGVAPTKAKRR

SEQ ID NO: 10949 - protein, 11 aa, HUMAN IMMUNODEFICIENCY VIRUS
IVFAVLSIVNR

SEQ ID NO: 10950 - protein, 8 aa, HUMAN IMMUNODEFICIENCY VIRUS
WNSSWSNK

SEQ ID NO: 10951 - protein, 11 aa, HUMAN IMMUNODEFICIENCY VIRUS
ENVTENFNMWK

SEQ ID NO: 10952 - protein, 9 aa, HUMAN IMMUNODEFICIENCY VIRUS
VLAVERYLK

SEQ ID NO: 10953 - protein, 10 aa, HUMAN IMMUNODEFICIENCY VIRUS
RVLAVERYLK

SEQ ID NO: 10954 - protein, 8 aa, HUMAN IMMUNODEFICIENCY VIRUS
NCRGEFFY

SEQ ID NO: 10955 - protein, 8 aa, HUMAN IMMUNODEFICIENCY VIRUS
GVAPTKAK

SEQ ID NO: 10956 - protein, 8 aa, HUMAN IMMUNODEFICIENCY VIRUS
VAPTKAKR

SEQ ID NO: 10957 - protein, 9 aa, HUMAN IMMUNODEFICIENCY VIRUS
FNCRGEFFY

SEQ ID NO: 10958 - protein, 9 aa, HUMAN IMMUNODEFICIENCY VIRUS
LGVAPTKAK

SEQ ID NO: 10959 - protein, 9 aa, HUMAN IMMUNODEFICIENCY VIRUS
GVAPTKAKR

SEQ ID NO: 10960 - protein, 10 aa, HUMAN IMMUNODEFICIENCY VIRUS
PLGVAPTKAK

SEQ ID NO: 10961 - protein, 10 aa, HUMAN IMMUNODEFICIENCY VIRUS
LGVAPTKAKR

SEQ ID NO: 10962 - protein, 11 aa, HUMAN IMMUNODEFICIENCY VIRUS
SSNITGLLLTR

SEQ ID NO: 10963 - protein, 11 aa, HUMAN IMMUNODEFICIENCY VIRUS
PLGVAPTKAKR

SEQ ID NO: 10964 - protein, 8 aa, HUMAN IMMUNODEFICIENCY VIRUS
AILKCNDK

SEQ ID NO: 10965 - protein, 11 aa, HUMAN IMMUNODEFICIENCY VIRUS
ETFRPGGGDMR

SEQ ID NO: 10966 - protein, 11 aa, HUMAN IMMUNODEFICIENCY VIRUS
LIEESQNQQEK

SEQ ID NO: 10967 - protein, 8 aa, HUMAN IMMUNODEFICIENCY VIRUS
GDLEITTH

SEQ ID NO: 10968 - protein, 9 aa, HUMAN IMMUNODEFICIENCY VIRUS
GGDLEITTH

SEQ ID NO: 10969 - protein, 11 aa, HUMAN IMMUNODEFICIENCY VIRUS
TAIAVAEGTDR

SEQ ID NO: 10970 - protein, 8 aa, HUMAN IMMUNODEFICIENCY VIRUS
RIVELLGR

SEQ ID NO: 10971 - protein, 8 aa, HUMAN IMMUNODEFICIENCY VIRUS
IVELLGRR

SEQ ID NO: 10972 - protein, 9 aa, HUMAN IMMUNODEFICIENCY VIRUS
RIVELLGRR

SEQ ID NO: 10973 - protein, 10 aa, HUMAN IMMUNODEFICIENCY VIRUS
NCTRPNNNTR

SEQ ID NO: 10974 - protein, 10 aa, HUMAN IMMUNODEFICIENCY VIRUS
CTRPNNNTRK

SEQ ID NO: 10975 - protein, 11 aa, HUMAN IMMUNODEFICIENCY VIRUS
TTTLFCASDAK

SEQ ID NO: 10976 - protein, 11 aa, HUMAN IMMUNODEFICIENCY VIRUS
INCTRPNNNTR

SEQ ID NO: 10977 - protein, 9 aa, HUMAN IMMUNODEFICIENCY VIRUS
TVQCTHGIR

SEQ ID NO: 10978 - protein, 10 aa, HUMAN IMMUNODEFICIENCY VIRUS
STVQCTHGIR

SEQ ID NO: 10979 - protein, 11 aa, HUMAN IMMUNODEFICIENCY VIRUS
VSTVQCTHGIR

SEQ ID NO: 10980 - protein, 10 aa, HUMAN IMMUNODEFICIENCY VIRUS
TFRPGGGDMR

SEQ ID NO: 10981 - protein, 8 aa, HUMAN IMMUNODEFICIENCY VIRUS
ALAWDDLR

SEQ ID NO: 10982 - protein, 9 aa, HUMAN IMMUNODEFICIENCY VIRUS
LALAWDDLR

SEQ ID NO: 10983 - protein, 10 aa, HUMAN IMMUNODEFICIENCY VIRUS
KNVSTVQCTH

SEQ ID NO: 10984 - protein, 10 aa, HUMAN IMMUNODEFICIENCY VIRUS
IVQQQNNLLR

SEQ ID NO: 10985 - protein, 10 aa, HUMAN IMMUNODEFICIENCY VIRUS
FLALAWDDLR

SEQ ID NO: 10986 - protein, 11 aa, HUMAN IMMUNODEFICIENCY VIRUS
GIVQQQNNLLR

SEQ ID NO: 10987 - protein, 11 aa, HUMAN IMMUNODEFICIENCY VIRUS
GFLALAWDDLR

SEQ ID NO: 10988 - protein, 8 aa, HUMAN IMMUNODEFICIENCY VIRUS
ITLPCRIK

SEQ ID NO: 10989 - protein, 8 aa, HUMAN IMMUNODEFICIENCY VIRUS
PLGVAPTK

SEQ ID NO: 10990 - protein, 8 aa, HUMAN IMMUNODEFICIENCY VIRUS
LAVERYLK

SEQ ID NO: 10991 - protein, 9 aa, HUMAN IMMUNODEFICIENCY VIRUS
KNNMVEQMH

SEQ ID NO: 10992 - protein, 10 aa, HUMAN IMMUNODEFICIENCY VIRUS
IVQQQSNLLR

SEQ ID NO: 10993 - protein, 11 aa, HUMAN IMMUNODEFICIENCY VIRUS
GIVQQQSNLLR

SEQ ID NO: 10994 - protein, 9 aa, HUMAN IMMUNODEFICIENCY VIRUS
IIGDIRQAH

SEQ ID NO: 10995 - protein, 8 aa, HUMAN IMMUNODEFICIENCY VIRUS
ESQNQQEK

SEQ ID NO: 10996 - protein, 8 aa, HUMAN IMMUNODEFICIENCY VIRUS
IGDIRQAH

SEQ ID NO: 10997 - protein, 8 aa, HUMAN IMMUNODEFICIENCY VIRUS
NNMVEQMH

SEQ ID NO: 10998 - protein, 9 aa, HUMAN IMMUNODEFICIENCY VIRUS
TVQCTHGIK

SEQ ID NO: 10999 - protein, 9 aa, HUMAN IMMUNODEFICIENCY VIRUS
CTRPNNNTR

SEQ ID NO: 11000 - protein, 10 aa, HUMAN IMMUNODEFICIENCY VIRUS
VSFEPIPIHY

SEQ ID NO: 11001 - protein, 10 aa, HUMAN IMMUNODEFICIENCY VIRUS
STVQCTHGIK

SEQ ID NO: 11002 - protein, 10 aa, HUMAN IMMUNODEFICIENCY VIRUS
ASITLTVQAR

SEQ ID NO: 11003 - protein, 11 aa, HUMAN IMMUNODEFICIENCY VIRUS
KVSFEPIPIHY

SEQ ID NO: 11004 - protein, 11 aa, HUMAN IMMUNODEFICIENCY VIRUS
YCAPAGFAILK

SEQ ID NO: 11005 - protein, 11 aa, HUMAN IMMUNODEFICIENCY VIRUS
VSTVQCTHGIK

SEQ ID NO: 11006 - protein, 11 aa, HUMAN IMMUNODEFICIENCY VIRUS
AASITLTVQAR

SEQ ID NO: 11007 - protein, 9 aa, HUMAN IMMUNODEFICIENCY VIRUS
VSFEPIPIH

SEQ ID NO: 11008 - protein, 10 aa, HUMAN IMMUNODEFICIENCY VIRUS
KVSFEPIPIH

SEQ ID NO: 11009 - protein, 10 aa, HUMAN IMMUNODEFICIENCY VIRUS
CAPAGFAILK

SEQ ID NO: 11010 - protein, 11 aa, HUMAN IMMUNODEFICIENCY VIRUS
RSELYKYKVVK

SEQ ID NO: 11011 - protein, 8 aa, HUMAN IMMUNODEFICIENCY VIRUS
AVLSIVNR

SEQ ID NO: 11012 - protein, 8 aa, HUMAN IMMUNODEFICIENCY VIRUS
AVAEGTDR

SEQ ID NO: 11013 - protein, 9 aa, HUMAN IMMUNODEFICIENCY VIRUS
VTENFNMWK

SEQ ID NO: 11014 - protein, 9 aa, HUMAN IMMUNODEFICIENCY VIRUS
SFEPIPIHY

SEQ ID NO: 11015 - protein, 9 aa, HUMAN IMMUNODEFICIENCY VIRUS
FAVLSIVNR

SEQ ID NO: 11016 - protein, 9 aa, HUMAN IMMUNODEFICIENCY VIRUS
SLCLFSYHR

SEQ ID NO: 11017 - protein, 9 aa, HUMAN IMMUNODEFICIENCY VIRUS
IAVAEGTDR

SEQ ID NO: 11018 - protein, 10 aa, HUMAN IMMUNODEFICIENCY VIRUS
NVTENFNMWK

SEQ ID NO: 11019 - protein, 10 aa, HUMAN IMMUNODEFICIENCY VIRUS
AVLSIVNRVR

SEQ ID NO: 11020 - protein, 10 aa, HUMAN IMMUNODEFICIENCY VIRUS
RSLCLFSYHR

SEQ ID NO: 11021 - protein, 10 aa, HUMAN IMMUNODEFICIENCY VIRUS
AIAVAEGTDR

SEQ ID NO: 11022 - protein, 11 aa, HUMAN IMMUNODEFICIENCY VIRUS
FAVLSIVNRVR

SEQ ID NO: 11023 - protein, 11 aa, HUMAN IMMUNODEFICIENCY VIRUS
DDLRSLCLFSY

SEQ ID NO: 11024 - protein, 11 aa, HUMAN IMMUNODEFICIENCY VIRUS
SLCLFSYHRLR

SEQ ID NO: 11025 - protein, 9 aa, HUMAN IMMUNODEFICIENCY VIRUS
ELYKYKVVK

SEQ ID NO: 11026 - protein, 8 aa, HUMAN IMMUNODEFICIENCY VIRUS
RVVEREKR

SEQ ID NO: 11027 - protein, 8 aa, HUMAN IMMUNODEFICIENCY VIRUS
ITLTVQAR

SEQ ID NO: 11028 - protein, 8 aa, HUMAN IMMUNODEFICIENCY VIRUS
SLCLFSYH

SEQ ID NO: 11029 - protein, 9 aa, HUMAN IMMUNODEFICIENCY VIRUS
SITLTVQAR

SEQ ID NO: 11030 - protein, 9 aa, HUMAN IMMUNODEFICIENCY VIRUS
RSLCLFSYH

SEQ ID NO: 11031 - protein, 11 aa, HUMAN IMMUNODEFICIENCY VIRUS
DLRSLCLFSYH

SEQ ID NO: 11032 - protein, 8 aa, HUMAN IMMUNODEFICIENCY VIRUS
SFEPIPIH

SEQ ID NO: 11033 - protein, 8 aa, HUMAN IMMUNODEFICIENCY VIRUS
RVLAVERY

SEQ ID NO: 11034 - protein, 9 aa, HUMAN IMMUNODEFICIENCY VIRUS
QARVLAVER

SEQ ID NO: 11035 - protein, 10 aa, HUMAN IMMUNODEFICIENCY VIRUS
QARVLAVERY

SEQ ID NO: 11036 - protein, 11 aa, HUMAN IMMUNODEFICIENCY VIRUS
QLQARVLAVER

SEQ ID NO: 11037 - protein, 11 aa, HUMAN IMMUNODEFICIENCY VIRUS
IMIVGGLIGLR

SEQ ID NO: 11038 - protein, 10 aa, HUMAN IMMUNODEFICIENCY VIRUS
LLQLTVWGIK

SEQ ID NO: 11039 - protein, 11 aa, HUMAN IMMUNODEFICIENCY VIRUS
HLLQLTVWGIK

SEQ ID NO: 11040 - protein, 11 aa, HUMAN IMMUNODEFICIENCY VIRUS
LSIVNRVRQGY

SEQ ID NO: 11041 - protein, 8 aa, HUMAN IMMUNODEFICIENCY VIRUS
NLWVTVYY

SEQ ID NO: 11042 - protein, 8 aa, HUMAN IMMUNODEFICIENCY VIRUS
NCGGEFFY

SEQ ID NO: 11043 - protein, 8 aa, HUMAN IMMUNODEFICIENCY VIRUS
RSLCLFSY

SEQ ID NO: 11044 - protein, 9 aa, HUMAN IMMUNODEFICIENCY VIRUS
EVHNVWATH

SEQ ID NO: 11045 - protein, 9 aa, HUMAN IMMUNODEFICIENCY VIRUS
FNCGGEFFY

SEQ ID NO: 11046 - protein, 9 aa, HUMAN IMMUNODEFICIENCY VIRUS
NITGLLLTR

SEQ ID NO: 11047 - protein, 10 aa, HUMAN IMMUNODEFICIENCY VIRUS
SFNCGGEFFY

SEQ ID NO: 11048 - protein, 10 aa, HUMAN IMMUNODEFICIENCY VIRUS
SNITGLLLTR

SEQ ID NO: 11049 - protein, 10 aa, HUMAN IMMUNODEFICIENCY VIRUS
DLRSLCLFSY

SEQ ID NO: 11050 - protein, 11 aa, HUMAN IMMUNODEFICIENCY VIRUS
HSFNCGGEFFY

SEQ ID NO: 11051 - protein, 10 aa, HUMAN IMMUNODEFICIENCY VIRUS
GGGDMRDNWR

SEQ ID NO: 11052 - protein, 10 aa, HUMAN IMMUNODEFICIENCY VIRUS
MIVGGLIGLR

SEQ ID NO: 11053 - protein, 10 aa, HUMAN IMMUNODEFICIENCY VIRUS
SIVNRVRQGY

SEQ ID NO: 11054 - protein, 11 aa, HUMAN IMMUNODEFICIENCY VIRUS
PGGGDMRDNWR

SEQ ID NO: 11055 - protein, 8 aa, HUMAN IMMUNODEFICIENCY VIRUS
ITGLLLTR

SEQ ID NO: 11056 - protein, 11 aa, HUMAN IMMUNODEFICIENCY VIRUS
DMRDNWRSELY

SEQ ID NO: 11057 - protein, 8 aa, HUMAN IMMUNODEFICIENCY VIRUS
PAGFAILK

SEQ ID NO: 11058 - protein, 8 aa, HUMAN IMMUNODEFICIENCY VIRUS
LSIVNRVR

SEQ ID NO: 11059 - protein, 9 aa, HUMAN IMMUNODEFICIENCY VIRUS
VLSIVNRVR

SEQ ID NO: 11060 - protein, 9 aa, HUMAN IMMUNODEFICIENCY VIRUS
IVNRVRQGY

SEQ ID NO: 11061 - protein, 10 aa, HUMAN IMMUNODEFICIENCY VIRUS
IISLWDQSLK

SEQ ID NO: 11062 - protein, 11 aa, HUMAN IMMUNODEFICIENCY VIRUS
DIISLWDQSLK

SEQ ID NO: 11063 - protein, 8 aa, HUMAN IMMUNODEFICIENCY VIRUS
GDMRDNWR

SEQ ID NO: 11064 - protein, 9 aa, HUMAN IMMUNODEFICIENCY VIRUS
GGDMRDNWR

SEQ ID NO: 11065 - protein, 9 aa, HUMAN IMMUNODEFICIENCY VIRUS
RDNWRSELY

SEQ ID NO: 11066 - protein, 10 aa, HUMAN IMMUNODEFICIENCY VIRUS
RDNWRSELYK

SEQ ID NO: 11067 - protein, 11 aa, HUMAN IMMUNODEFICIENCY VIRUS
TLFCASDAKAY

SEQ ID NO: 11068 - protein, 11 aa, HUMAN IMMUNODEFICIENCY VIRUS
RDNWRSELYKY

SEQ ID NO: 11069 - protein, 10 aa, HUMAN IMMUNODEFICIENCY VIRUS
TVYYGVPVWK

SEQ ID NO: 11070 - protein, 11 aa, HUMAN IMMUNODEFICIENCY VIRUS
VTVYYGVPVWK

SEQ ID NO: 11071 - protein, 8 aa, HUMAN IMMUNODEFICIENCY VIRUS
CASDAKAY

SEQ ID NO: 11072 - protein, 8 aa, HUMAN IMMUNODEFICIENCY VIRUS
LCLFSYHR

SEQ ID NO: 11073 - protein, 9 aa, HUMAN IMMUNODEFICIENCY VIRUS
FCASDAKAY

SEQ ID NO: 11074 - protein, 9 aa, HUMAN IMMUNODEFICIENCY VIRUS
IVGGLIGLR

SEQ ID NO: 11075 - protein, 9 aa, HUMAN IMMUNODEFICIENCY VIRUS
CLFSYHRLR

SEQ ID NO: 11076 - protein, 10 aa, HUMAN IMMUNODEFICIENCY VIRUS
LFCASDAKAY

SEQ ID NO: 11077 - protein, 10 aa, HUMAN IMMUNODEFICIENCY VIRUS
LCLFSYHRLR

SEQ ID NO: 11078 - protein, 8 aa, HUMAN IMMUNODEFICIENCY VIRUS
VGGLIGLR

SEQ ID NO: 11079 - protein, 8 aa, HUMAN IMMUNODEFICIENCY VIRUS
QLTVWGIK

SEQ ID NO: 11080 - protein, 8 aa, HUMAN IMMUNODEFICIENCY VIRUS
LFSYHRLR

SEQ ID NO: 11081 - protein, 8 aa, HUMAN IMMUNODEFICIENCY VIRUS
RIRQGLER

SEQ ID NO: 11082 - protein, 8 aa, HUMAN IMMUNODEFICIENCY VIRUS
VNRVRQGY

SEQ ID NO: 11083 - protein, 8 aa, HUMAN IMMUNODEFICIENCY VIRUS
SLWDQSLK

SEQ ID NO: 11084 - protein, 9 aa, HUMAN IMMUNODEFICIENCY VIRUS
ISLWDQSLK

SEQ ID NO: 11085 - protein, 10 aa, HUMAN IMMUNODEFICIENCY VIRUS
WDQSLKPCVK

SEQ ID NO: 11086 - protein, 8 aa, HUMAN IMMUNODEFICIENCY VIRUS
QSLKPCVK

SEQ ID NO: 11087 - protein, 11 aa, HUMAN IMMUNODEFICIENCY VIRUS
TVWGIKQLQAR

SEQ ID NO: 11088 - protein, 8 aa, HUMAN IMMUNODEFICIENCY VIRUS
DNWRSELY

SEQ ID NO: 11089 - protein, 8 aa, HUMAN IMMUNODEFICIENCY VIRUS
GIKQLQAR

SEQ ID NO: 11090 - protein, 9 aa, HUMAN IMMUNODEFICIENCY VIRUS
DNWRSELYK

SEQ ID NO: 11091 - protein, 9 aa, HUMAN IMMUNODEFICIENCY VIRUS
WGIKQLQAR

SEQ ID NO: 11092 - protein, 10 aa, HUMAN IMMUNODEFICIENCY VIRUS
DNWRSELYKY

SEQ ID NO: 11093 - protein, 11 aa, HUMAN IMMUNODEFICIENCY VIRUS
DNWRSELYKYK

SEQ ID NO: 11094 - protein, 9 aa, HUMAN IMMUNODEFICIENCY VIRUS
LGIWGCSGK

SEQ ID NO: 11095 - protein, 10 aa, HUMAN IMMUNODEFICIENCY VIRUS
TTLFCASDAK

SEQ ID NO: 11096 - protein, 10 aa, HUMAN IMMUNODEFICIENCY VIRUS
LLGIWGCSGK

SEQ ID NO: 11097 - protein, 11 aa, HUMAN IMMUNODEFICIENCY VIRUS
NLLRAIEAQQH

SEQ ID NO: 11098 - protein, 11 aa, HUMAN IMMUNODEFICIENCY VIRUS
QLLGIWGCSGK

SEQ ID NO: 11099 - protein, 8 aa, HUMAN IMMUNODEFICIENCY VIRUS
VSTVQCTH

SEQ ID NO: 11100 - protein, 8 aa, HUMAN IMMUNODEFICIENCY VIRUS
RAIEAQQH

SEQ ID NO: 11101 - protein, 9 aa, HUMAN IMMUNODEFICIENCY VIRUS
NVSTVQCTH

SEQ ID NO: 11102 - protein, 10 aa, HUMAN IMMUNODEFICIENCY VIRUS
LLRAIEAQQH

SEQ ID NO: 11103 - protein, 8 aa, HUMAN IMMUNODEFICIENCY VIRUS
GIWGCSGK

SEQ ID NO: 11104 - protein, 9 aa, HUMAN IMMUNODEFICIENCY VIRUS
TLFCASDAK

SEQ ID NO: 11105 - protein, 8 aa, HUMAN IMMUNODEFICIENCY VIRUS
RSELYKYK

SEQ ID NO: 11106 - protein, 8 aa, HUMAN IMMUNODEFICIENCY VIRUS
LFCASDAK

SEQ ID NO: 11107 - protein, 8 aa, HUMAN IMMUNODEFICIENCY VIRUS
AAAIMMQK

SEQ ID NO: 11108 - protein, 8 aa, HUMAN IMMUNODEFICIENCY VIRUS
SATIMMQR

SEQ ID NO: 11109 - protein, 8 aa, HUMAN IMMUNODEFICIENCY VIRUS
KDKDKELY

SEQ ID NO: 11110 - protein, 8 aa, HUMAN IMMUNODEFICIENCY VIRUS
ETIDKDLY

SEQ ID NO: 11111 - protein, 9 aa, HUMAN IMMUNODEFICIENCY VIRUS
NSATIMMQR

SEQ ID NO: 11112 - protein, 9 aa, HUMAN IMMUNODEFICIENCY VIRUS
TAPPPESFR

SEQ ID NO: 11113 - protein, 10 aa, HUMAN IMMUNODEFICIENCY VIRUS
NGKQANFLGK

SEQ ID NO: 11114 - protein, 10 aa, HUMAN IMMUNODEFICIENCY VIRUS
NGRQANFLGK

SEQ ID NO: 11115 - protein, 10 aa, HUMAN IMMUNODEFICIENCY VIRUS
PTAPPPESFR

SEQ ID NO: 11116 - protein, 11 aa, HUMAN IMMUNODEFICIENCY VIRUS
NGKQANFLGKY

SEQ ID NO: 11117 - protein, 11 aa, HUMAN IMMUNODEFICIENCY VIRUS
NGRQANFLGKY

SEQ ID NO: 11118 - protein, 8 aa, HUMAN IMMUNODEFICIENCY VIRUS
PAAADKEK

SEQ ID NO: 11119 - protein, 8 aa, HUMAN IMMUNODEFICIENCY VIRUS
ASAQQDLK

SEQ ID NO: 11120 - protein, 8 aa, HUMAN IMMUNODEFICIENCY VIRUS
ATAQQDLK

SEQ ID NO: 11121 - protein, 10 aa, HUMAN IMMUNODEFICIENCY VIRUS
AADKGVSQNY

SEQ ID NO: 11122 - protein, 10 aa, HUMAN IMMUNODEFICIENCY VIRUS
SAQQDLKGGY

SEQ ID NO: 11123 - protein, 10 aa, HUMAN IMMUNODEFICIENCY VIRUS
TAQQDLKGGY

SEQ ID NO: 11124 - protein, 10 aa, HUMAN IMMUNODEFICIENCY VIRUS
GTRPGNYVQK

SEQ ID NO: 11125 - protein, 10 aa, HUMAN IMMUNODEFICIENCY VIRUS
GTRPGNYVQR

SEQ ID NO: 11126 - protein, 10 aa, HUMAN IMMUNODEFICIENCY VIRUS
ITSLPKQEQK

SEQ ID NO: 11127 - protein, 11 aa, HUMAN IMMUNODEFICIENCY VIRUS
PAAADKEKDSK

SEQ ID NO: 11128 - protein, 11 aa, HUMAN IMMUNODEFICIENCY VIRUS
GANSIPVGDIY

SEQ ID NO: 11129 - protein, 11 aa, HUMAN IMMUNODEFICIENCY VIRUS
PNQPIPVGDIY

SEQ ID NO: 11130 - protein, 11 aa, HUMAN IMMUNODEFICIENCY VIRUS
ASAQQDLKGGY

SEQ ID NO: 11131 - protein, 11 aa, HUMAN IMMUNODEFICIENCY VIRUS
ATAQQDLKGGY

SEQ ID NO: 11132 - protein, 11 aa, HUMAN IMMUNODEFICIENCY VIRUS
EITSLPKQEQK

SEQ ID NO: 11133 - protein, 8 aa, HUMAN IMMUNODEFICIENCY VIRUS
YTAVFMQR

SEQ ID NO: 11134 - protein, 9 aa, HUMAN IMMUNODEFICIENCY VIRUS
TAPPAESFR

SEQ ID NO: 11135 - protein, 10 aa, HUMAN IMMUNODEFICIENCY VIRUS
PTAPPAESFR

SEQ ID NO: 11136 - protein, 10 aa, HUMAN IMMUNODEFICIENCY VIRUS
EGRQANFLGK

SEQ ID NO: 11137 - protein, 11 aa, HUMAN IMMUNODEFICIENCY VIRUS
AADKGKVSQNY

SEQ ID NO: 11138 - protein, 10 aa, HUMAN IMMUNODEFICIENCY VIRUS
EADGKVSQNY

SEQ ID NO: 11139 - protein, 8 aa, HUMAN IMMUNODEFICIENCY VIRUS
AAAIMMQK

SEQ ID NO: 11140 - protein, 11 aa, HUMAN IMMUNODEFICIENCY VIRUS
AAIMMQKSNFK

SEQ ID NO: 11141 - protein, 10 aa, HUMAN IMMUNODEFICIENCY VIRUS
KTVKCFNCGK

SEQ ID NO: 11142 - protein, 8 aa, HUMAN IMMUNODEFICIENCY VIRUS
GARASILR

SEQ ID NO: 11143 - protein, 8 aa, HUMAN IMMUNODEFICIENCY VIRUS
PGNFPQSR

SEQ ID NO: 11144 - protein, 9 aa, HUMAN IMMUNODEFICIENCY VIRUS
MGARASILR

SEQ ID NO: 11145 - protein, 9 aa, HUMAN IMMUNODEFICIENCY VIRUS
KIWPSSKGR

SEQ ID NO: 11146 - protein, 11 aa, HUMAN IMMUNODEFICIENCY VIRUS
TGNSSQVSQNY

SEQ ID NO: 11147 - protein, 11 aa, HUMAN IMMUNODEFICIENCY VIRUS
NFLGKIWPSSK

SEQ ID NO: 11148 - protein, 8 aa, HUMAN IMMUNODEFICIENCY VIRUS
PVAPGQMR

SEQ ID NO: 11149 - protein, 8 aa, HUMAN IMMUNODEFICIENCY VIRUS
MMQKSNFK

SEQ ID NO: 11150 - protein, 8 aa, HUMAN IMMUNODEFICIENCY VIRUS
MMQRGNFK

SEQ ID NO: 11151 - protein, 9 aa, HUMAN IMMUNODEFICIENCY VIRUS
KLDKWEKIR

SEQ ID NO: 11152 - protein, 9 aa, HUMAN IMMUNODEFICIENCY VIRUS
GGKKKYKLK

SEQ ID NO: 11153 - protein, 9 aa, HUMAN IMMUNODEFICIENCY VIRUS
RDTKEALDK

SEQ ID NO: 11154 - protein, 9 aa, HUMAN IMMUNODEFICIENCY VIRUS
IMMQKSNFK

SEQ ID NO: 11155 - protein, 9 aa, HUMAN IMMUNODEFICIENCY VIRUS
LGKIWPSSK

SEQ ID NO: 11156 - protein, 10 aa, HUMAN IMMUNODEFICIENCY VIRUS
PGGKKKYKLK

SEQ ID NO: 11157 - protein, 10 aa, HUMAN IMMUNODEFICIENCY VIRUS
GGKKKYKLKH

SEQ ID NO: 11158 - protein, 10 aa, HUMAN IMMUNODEFICIENCY VIRUS
AGPVAPGQMR

SEQ ID NO: 11159 - protein, 10 aa, HUMAN IMMUNODEFICIENCY VIRUS
FLGKIWPSSK

SEQ ID NO: 11160 - protein, 11 aa, HUMAN IMMUNODEFICIENCY VIRUS
KLDKWEKIRLR

SEQ ID NO: 11161 - protein, 11 aa, HUMAN IMMUNODEFICIENCY VIRUS
PGGKKKYKLKH

SEQ ID NO: 11162 - protein, 11 aa, HUMAN IMMUNODEFICIENCY VIRUS
LGKIWPSSKGR

SEQ ID NO: 11163 - protein, 11 aa, HUMAN IMMUNODEFICIENCY VIRUS
ATIMMQRGNFR

SEQ ID NO: 11164 - protein, 10 aa, HUMAN IMMUNODEFICIENCY VIRUS
PSQKQEPIDK

SEQ ID NO: 11165 - protein, 8 aa, HUMAN IMMUNODEFICIENCY VIRUS
PIPVGDIY

SEQ ID NO: 11166 - protein, 9 aa, HUMAN IMMUNODEFICIENCY VIRUS
TIKCFNCGK

SEQ ID NO: 11167 - protein, 9 aa, HUMAN IMMUNODEFICIENCY VIRUS
TVKCFNCGK

SEQ ID NO: 11168 - protein, 10 aa, HUMAN IMMUNODEFICIENCY VIRUS
GNSSQVSQNY

SEQ ID NO: 11169 - protein, 10 aa, HUMAN IMMUNODEFICIENCY VIRUS
TIMMQRGNFR

SEQ ID NO: 11170 - protein, 8 aa, HUMAN IMMUNODEFICIENCY VIRUS
QTGSEELR

SEQ ID NO: 11171 - protein, 11 aa, HUMAN IMMUNODEFICIENCY VIRUS
FNCGKEGHIAR

SEQ ID NO: 11172 - protein, 8 aa, HUMAN IMMUNODEFICIENCY VIRUS
PGGKKKYK

SEQ ID NO: 11173 - protein, 8 aa, HUMAN IMMUNODEFICIENCY VIRUS
TLYCVHQK

SEQ ID NO: 11174 - protein, 8 aa, HUMAN IMMUNODEFICIENCY VIRUS
DTKEALEK

SEQ ID NO: 11175 - protein, 8 aa, HUMAN IMMUNODEFICIENCY VIRUS
MLNIVGGH

SEQ ID NO: 11176 - protein, 8 aa, HUMAN IMMUNODEFICIENCY VIRUS
PTSILDIR

SEQ ID NO: 11177 - protein, 9 aa, HUMAN IMMUNODEFICIENCY VIRUS
GSEELRSLY

SEQ ID NO: 11178 - protein, 9 aa, HUMAN IMMUNODEFICIENCY VIRUS
ATLYCVHQK

SEQ ID NO: 11179 - protein, 9 aa, HUMAN IMMUNODEFICIENCY VIRUS
KDTKEALEK

SEQ ID NO: 11180 - protein, 9 aa, HUMAN IMMUNODEFICIENCY VIRUS
MMLNIVGGH

SEQ ID NO: 11181 - protein, 10 aa, HUMAN IMMUNODEFICIENCY VIRUS
TGSEELRSLY

SEQ ID NO: 11182 - protein, 10 aa, HUMAN IMMUNODEFICIENCY VIRUS
VATLYCVHQK

SEQ ID NO: 11183 - protein, 10 aa, HUMAN IMMUNODEFICIENCY VIRUS
NMMLNIVGGH

SEQ ID NO: 11184 - protein, 10 aa, HUMAN IMMUNODEFICIENCY VIRUS
YSPTSILDIR

SEQ ID NO: 11185 - protein, 10 aa, HUMAN IMMUNODEFICIENCY VIRUS
RAEQASQEVK

SEQ ID NO: 11186 - protein, 11 aa, HUMAN IMMUNODEFICIENCY VIRUS
RLRPGGKKKYK

SEQ ID NO: 11187 - protein, 11 aa, HUMAN IMMUNODEFICIENCY VIRUS
TVATLYCVHQK

SEQ ID NO: 11188 - protein, 11 aa, HUMAN IMMUNODEFICIENCY VIRUS
LNMMLNIVGGH

SEQ ID NO: 11189 - protein, 11 aa, HUMAN IMMUNODEFICIENCY VIRUS
SNPPIPVGEIY

SEQ ID NO: 11190 - protein, 11 aa, HUMAN IMMUNODEFICIENCY VIRUS
TSILDIRQGPK

SEQ ID NO: 11191 - protein, 8 aa, HUMAN IMMUNODEFICIENCY VIRUS
PGNFLQNR

SEQ ID NO: 11192 - protein, 9 aa, HUMAN IMMUNODEFICIENCY VIRUS
IARNCRAPR

SEQ ID NO: 11193 - protein, 9 aa, HUMAN IMMUNODEFICIENCY VIRUS
KIWPSNKGR

SEQ ID NO: 11194 - protein, 10 aa, HUMAN IMMUNODEFICIENCY VIRUS
NCGKEGHIAR

SEQ ID NO: 11195 - protein, 10 aa, HUMAN IMMUNODEFICIENCY VIRUS
IARNCRAPRK

SEQ ID NO: 11196 - protein, 11 aa, HUMAN IMMUNODEFICIENCY VIRUS
IARNCRAPRKK

SEQ ID NO: 11197 - protein, 11 aa, HUMAN IMMUNODEFICIENCY VIRUS
NFLGKIWPSNK

SEQ ID NO: 11198 - protein, 11 aa, HUMAN IMMUNODEFICIENCY VIRUS
KGRPGNFLQNR

SEQ ID NO: 11199 - protein, 8 aa, HUMAN IMMUNODEFICIENCY VIRUS
RIEVKDTK

SEQ ID NO: 11200 - protein, 9 aa, HUMAN IMMUNODEFICIENCY VIRUS
IVKCFNCGK

SEQ ID NO: 11201 - protein, 9 aa, HUMAN IMMUNODEFICIENCY VIRUS
CGKEGHIAR

SEQ ID NO: 11202 - protein, 9 aa, HUMAN IMMUNODEFICIENCY VIRUS
EGHIARNCR

SEQ ID NO: 11203 - protein, 9 aa, HUMAN IMMUNODEFICIENCY VIRUS
LGKIWPSNK

SEQ ID NO: 11204 - protein, 10 aa, HUMAN IMMUNODEFICIENCY VIRUS
KLKHIVWASR

SEQ ID NO: 11205 - protein, 10 aa, HUMAN IMMUNODEFICIENCY VIRUS
HIARNCRAPR

SEQ ID NO: 11206 - protein, 10 aa, HUMAN IMMUNODEFICIENCY VIRUS
FLGKIWPSNK

SEQ ID NO: 11207 - protein, 11 aa, HUMAN IMMUNODEFICIENCY VIRUS
EVKDTKEALDK

SEQ ID NO: 11208 - protein, 11 aa, HUMAN IMMUNODEFICIENCY VIRUS
AAEWDRVHPVH

SEQ ID NO: 11209 - protein, 11 aa, HUMAN IMMUNODEFICIENCY VIRUS
HIARNCRAPRK

SEQ ID NO: 11210 - protein, 11 aa, HUMAN IMMUNODEFICIENCY VIRUS
LGKIWPSNKGR

SEQ ID NO: 11211 - protein, 9 aa, HUMAN IMMUNODEFICIENCY VIRUS
NSSQVSQNY

SEQ ID NO: 11212 - protein, 10 aa, HUMAN IMMUNODEFICIENCY VIRUS
NCGKEGHIAK

SEQ ID NO: 11213 - protein, 11 aa, HUMAN IMMUNODEFICIENCY VIRUS
FNCGKEGHIAK

SEQ ID NO: 11214 - protein, 11 aa, HUMAN IMMUNODEFICIENCY VIRUS
IAKNCRAPRKK

SEQ ID NO: 11215 - protein, 9 aa, HUMAN IMMUNODEFICIENCY VIRUS
QNAQGQMVH

SEQ ID NO: 11216 - protein, 9 aa, HUMAN IMMUNODEFICIENCY VIRUS
RGNFRNQRK

SEQ ID NO: 11217 - protein, 9 aa, HUMAN IMMUNODEFICIENCY VIRUS
CGKEGHIAK

SEQ ID NO: 11218 - protein, 9 aa, HUMAN IMMUNODEFICIENCY VIRUS
EGHIAKNCR

SEQ ID NO: 11219 - protein, 11 aa, HUMAN IMMUNODEFICIENCY VIRUS
FNTVATLYCVH

SEQ ID NO: 11220 - protein, 11 aa, HUMAN IMMUNODEFICIENCY VIRUS
TVATLYCVHQR

SEQ ID NO: 11221 - protein, 11 aa, HUMAN IMMUNODEFICIENCY VIRUS
IVQNAQGQMVH

SEQ ID NO: 11222 - protein, 8 aa, HUMAN IMMUNODEFICIENCY VIRUS
SSQVSQNY

SEQ ID NO: 11223 - protein, 11 aa, HUMAN IMMUNODEFICIENCY VIRUS
RSLYNTVATLY

SEQ ID NO: 11224 - protein, 8 aa, HUMAN IMMUNODEFICIENCY VIRUS
FNTVATLY

SEQ ID NO: 11225 - protein, 8 aa, HUMAN IMMUNODEFICIENCY VIRUS
TLYCVHQR

SEQ ID NO: 11226 - protein, 8 aa, HUMAN IMMUNODEFICIENCY VIRUS
AAEWDRVH

SEQ ID NO: 11227 - protein, 8 aa, HUMAN IMMUNODEFICIENCY VIRUS
WDRVHPVH

SEQ ID NO: 11228 - protein, 8 aa, HUMAN IMMUNODEFICIENCY VIRUS
RGNFRNQR

SEQ ID NO: 11229 - protein, 9 aa, HUMAN IMMUNODEFICIENCY VIRUS
LFNTVATLY

SEQ ID NO: 11230 - protein, 9 aa, HUMAN IMMUNODEFICIENCY VIRUS
ATLYCVHQR

SEQ ID NO: 11231 - protein, 9 aa, HUMAN IMMUNODEFICIENCY VIRUS
EAAEWDRVH

SEQ ID NO: 11232 - protein, 9 aa, HUMAN IMMUNODEFICIENCY VIRUS
TAPPEESFR

SEQ ID NO: 11233 - protein, 10 aa, HUMAN IMMUNODEFICIENCY VIRUS
SGGKLDAWEK

SEQ ID NO: 11234 - protein, 10 aa, HUMAN IMMUNODEFICIENCY VIRUS
SLFNTVATLY

SEQ ID NO: 11235 - protein, 10 aa, HUMAN IMMUNODEFICIENCY VIRUS
VATLYCVHQR

SEQ ID NO: 11236 - protein, 10 aa, HUMAN IMMUNODEFICIENCY VIRUS
KIEEEQNKSK

SEQ ID NO: 11237 - protein, 10 aa, HUMAN IMMUNODEFICIENCY VIRUS
RAEQATQDVK

SEQ ID NO: 11238 - protein, 10 aa, HUMAN IMMUNODEFICIENCY VIRUS
PTAPPEESFR

SEQ ID NO: 11239 - protein, 11 aa, HUMAN IMMUNODEFICIENCY VIRUS
LSGGKLDAWEK

SEQ ID NO: 11240 - protein, 11 aa, HUMAN IMMUNODEFICIENCY VIRUS
PGLLETSEGCR

SEQ ID NO: 11241 - protein, 11 aa, HUMAN IMMUNODEFICIENCY VIRUS
KIEEEQNKSKK

SEQ ID NO: 11242 - protein, 11 aa, HUMAN IMMUNODEFICIENCY VIRUS
MMQRGNFRNQR

SEQ ID NO: 11243 - protein, 10 aa, HUMAN IMMUNODEFICIENCY VIRUS
IAKNCRAPRK

SEQ ID NO: 11244 - protein, 8 aa, HUMAN IMMUNODEFICIENCY VIRUS
LDAWEKIR

SEQ ID NO: 11245 - protein, 8 aa, HUMAN IMMUNODEFICIENCY VIRUS
NAQGQMVH

SEQ ID NO: 11246 - protein, 8 aa, HUMAN IMMUNODEFICIENCY VIRUS
PVSILDIK

SEQ ID NO: 11247 - protein, 8 aa, HUMAN IMMUNODEFICIENCY VIRUS
GNFRNQRK

SEQ ID NO: 11248 - protein, 9 aa, HUMAN IMMUNODEFICIENCY VIRUS
KLDAWEKIR

SEQ ID NO: 11249 - protein, 9 aa, HUMAN IMMUNODEFICIENCY VIRUS
GGKKKYRLK

SEQ ID NO: 11250 - protein, 10 aa, HUMAN IMMUNODEFICIENCY VIRUS
LDAWEKIRLR

SEQ ID NO: 11251 - protein, 10 aa, HUMAN IMMUNODEFICIENCY VIRUS
PGGKKKYRLK

SEQ ID NO: 11252 - protein, 10 aa, HUMAN IMMUNODEFICIENCY VIRUS
GGKKKYRLKH

SEQ ID NO: 11253 - protein, 10 aa, HUMAN IMMUNODEFICIENCY VIRUS
GLLETSEGCR

SEQ ID NO: 11254 - protein, 10 aa, HUMAN IMMUNODEFICIENCY VIRUS
YSPVSILDIK

SEQ ID NO: 11255 - protein, 11 aa, HUMAN IMMUNODEFICIENCY VIRUS
GGKLDAWEKIR

SEQ ID NO: 11256 - protein, 11 aa, HUMAN IMMUNODEFICIENCY VIRUS
KLDAWEKIRLR

SEQ ID NO: 11257 - protein, 11 aa, HUMAN IMMUNODEFICIENCY VIRUS
PGGKKKYRLKH

SEQ ID NO: 11258 - protein, 11 aa, HUMAN IMMUNODEFICIENCY VIRUS
VSILDIKQGPK

SEQ ID NO: 11259 - protein, 11 aa, HUMAN IMMUNODEFICIENCY VIRUS
HIAKNCRAPRK

SEQ ID NO: 11260 - protein, 8 aa, HUMAN IMMUNODEFICIENCY VIRUS
PIPPGQMR

SEQ ID NO: 11261 - protein, 9 aa, HUMAN IMMUNODEFICIENCY VIRUS
GGKLDAWEK

SEQ ID NO: 11262 - protein, 9 aa, HUMAN IMMUNODEFICIENCY VIRUS
DAWEKIRLR

SEQ ID NO: 11263 - protein, 9 aa, HUMAN IMMUNODEFICIENCY VIRUS
LLETSEGCR

SEQ ID NO: 11264 - protein, 10 aa, HUMAN IMMUNODEFICIENCY VIRUS
RLKHLVWASR

SEQ ID NO: 11265 - protein, 10 aa, HUMAN IMMUNODEFICIENCY VIRUS
LDKIEEEQNK

SEQ ID NO: 11266 - protein, 10 aa, HUMAN IMMUNODEFICIENCY VIRUS
AGPIPPGQMR

SEQ ID NO: 11267 - protein, 11 aa, HUMAN IMMUNODEFICIENCY VIRUS
ALDKIEEEQNK

SEQ ID NO: 11268 - protein, 11 aa, HUMAN IMMUNODEFICIENCY VIRUS
LSPRTLNAWVK

SEQ ID NO: 11269 - protein, 11 aa, HUMAN IMMUNODEFICIENCY VIRUS
HAGPIPPGQMR

SEQ ID NO: 11270 - protein, 11 aa, HUMAN IMMUNODEFICIENCY VIRUS
PIPPGQMREPR

SEQ ID NO: 11271 - protein, 9 aa, HUMAN IMMUNODEFICIENCY VIRUS
IAKNCRAPR

SEQ ID NO: 11272 - protein, 8 aa, HUMAN IMMUNODEFICIENCY VIRUS
LDKWEKIR

SEQ ID NO: 11273 - protein, 8 aa, HUMAN IMMUNODEFICIENCY VIRUS
PVGDIYKR

SEQ ID NO: 11274 - protein, 8 aa, HUMAN IMMUNODEFICIENCY VIRUS
PDCKTILR

SEQ ID NO: 11275 - protein, 10 aa, HUMAN IMMUNODEFICIENCY VIRUS
LDKWEKIRLR

SEQ ID NO: 11276 - protein, 10 aa, HUMAN IMMUNODEFICIENCY VIRUS
SILDIKQGPK

SEQ ID NO: 11277 - protein, 10 aa, HUMAN IMMUNODEFICIENCY VIRUS
ANPDCKTILR

SEQ ID NO: 11278 - protein, 10 aa, HUMAN IMMUNODEFICIENCY VIRUS
HIAKNCRAPR

SEQ ID NO: 11279 - protein, 11 aa, HUMAN IMMUNODEFICIENCY VIRUS
HAGPIAPGQMR

SEQ ID NO: 11280 - protein, 11 aa, HUMAN IMMUNODEFICIENCY VIRUS
NNPPIPVGEIY

SEQ ID NO: 11281 - protein, 11 aa, HUMAN IMMUNODEFICIENCY VIRUS
NANPDCKTILR

SEQ ID NO: 11282 - protein, 11 aa, HUMAN IMMUNODEFICIENCY VIRUS
LARNCRAPRKK

SEQ ID NO: 11283 - protein, 8 aa, HUMAN IMMUNODEFICIENCY VIRUS
PIAPGQMR

SEQ ID NO: 11284 - protein, 8 aa, HUMAN IMMUNODEFICIENCY VIRUS
LDIKQGPK

SEQ ID NO: 11285 - protein, 9 aa, HUMAN IMMUNODEFICIENCY VIRUS
ILDIKQGPK

SEQ ID NO: 11286 - protein, 10 aa, HUMAN IMMUNODEFICIENCY VIRUS
AGPIAPGQMR

SEQ ID NO: 11287 - protein, 10 aa, HUMAN IMMUNODEFICIENCY VIRUS
IAPGQMREPR

SEQ ID NO: 11288 - protein, 11 aa, HUMAN IMMUNODEFICIENCY VIRUS
RLRPGGKKKYR

SEQ ID NO: 11289 - protein, 11 aa, HUMAN IMMUNODEFICIENCY VIRUS
PIAPGQMREPR

SEQ ID NO: 11290 - protein, 11 aa, HUMAN IMMUNODEFICIENCY VIRUS
DIKQGPKEPFR

SEQ ID NO: 11291 - protein, 9 aa, HUMAN IMMUNODEFICIENCY VIRUS
LARNCRAPR

SEQ ID NO: 11292 - protein, 10 aa, HUMAN IMMUNODEFICIENCY VIRUS
LARNCRAPRK

SEQ ID NO: 11293 - protein, 8 aa, HUMAN IMMUNODEFICIENCY VIRUS
PGGKKKYR

SEQ ID NO: 11294 - protein, 9 aa, HUMAN IMMUNODEFICIENCY VIRUS
IMMQRGNFR

SEQ ID NO: 11295 - protein, 9 aa, HUMAN IMMUNODEFICIENCY VIRUS
KNCRAPRKK

SEQ ID NO: 11296 - protein, 10 aa, HUMAN IMMUNODEFICIENCY VIRUS
IVWASRELER

SEQ ID NO: 11297 - protein, 10 aa, HUMAN IMMUNODEFICIENCY VIRUS
HLARNCRAPR

SEQ ID NO: 11298 - protein, 11 aa, HUMAN IMMUNODEFICIENCY VIRUS
HIVWASRELER

SEQ ID NO: 11299 - protein, 11 aa, HUMAN IMMUNODEFICIENCY VIRUS
HLARNCRAPRK

SEQ ID NO: 11300 - protein, 9 aa, HUMAN IMMUNODEFICIENCY VIRUS
EGHLARNCR

SEQ ID NO: 11301 - protein, 9 aa, HUMAN IMMUNODEFICIENCY VIRUS
KIWPSHKGR

SEQ ID NO: 11302 - protein, 8 aa, HUMAN IMMUNODEFICIENCY VIRUS
GGPSHKAR

SEQ ID NO: 11303 - protein, 8 aa, HUMAN IMMUNODEFICIENCY VIRUS
KNCRAPRK

SEQ ID NO: 11304 - protein, 9 aa, HUMAN IMMUNODEFICIENCY VIRUS
VGGPSHKAR

SEQ ID NO: 11305 - protein, 10 aa, HUMAN IMMUNODEFICIENCY VIRUS
SLYNTVATLY

SEQ ID NO: 11306 - protein, 10 aa, HUMAN IMMUNODEFICIENCY VIRUS
GVGGPSHKAR

SEQ ID NO: 11307 - protein, 11 aa, HUMAN IMMUNODEFICIENCY VIRUS
QGVGGPSHKAR

SEQ ID NO: 11308 - protein, 11 aa, HUMAN IMMUNODEFICIENCY VIRUS
LGKIWPSHKGR

SEQ ID NO: 11309 - protein, 11 aa, HUMAN IMMUNODEFICIENCY VIRUS
NFLGKIWPSHK

SEQ ID NO: 11310 - protein, 8 aa, HUMAN IMMUNODEFICIENCY VIRUS
YNTVATLY

SEQ ID NO: 11311 - protein, 8 aa, HUMAN IMMUNODEFICIENCY VIRUS
KIEEEQNK

SEQ ID NO: 11312 - protein, 8 aa, HUMAN IMMUNODEFICIENCY VIRUS
QGVGGPSH

SEQ ID NO: 11313 - protein, 8 aa, HUMAN IMMUNODEFICIENCY VIRUS
GVGGPSHK

SEQ ID NO: 11314 - protein, 8 aa, HUMAN IMMUNODEFICIENCY VIRUS
MMQRGNFR

SEQ ID NO: 11315 - protein, 9 aa, HUMAN IMMUNODEFICIENCY VIRUS
QGVGGPSHK

SEQ ID NO: 11316 - protein, 9 aa, HUMAN IMMUNODEFICIENCY VIRUS
LGKIWPSHK

SEQ ID NO: 11317 - protein, 10 aa, HUMAN IMMUNODEFICIENCY VIRUS
ACQGVGGPSH

SEQ ID NO: 11318 - protein, 10 aa, HUMAN IMMUNODEFICIENCY VIRUS
FLGKIWPSHK

SEQ ID NO: 11319 - protein, 11 aa, HUMAN IMMUNODEFICIENCY VIRUS
YNTVATLYCVH

SEQ ID NO: 11320 - protein, 11 aa, HUMAN IMMUNODEFICIENCY VIRUS
TACQGVGGPSH

SEQ ID NO: 11321 - protein, 11 aa, HUMAN IMMUNODEFICIENCY VIRUS
ACQGVGGPSHK

SEQ ID NO: 11322 - protein, 10 aa, HUMAN IMMUNODEFICIENCY VIRUS
NCGKEGHLAR

SEQ ID NO: 11323 - protein, 11 aa, HUMAN IMMUNODEFICIENCY VIRUS
FNCGKEGHLAR

SEQ ID NO: 11324 - protein, 9 aa, HUMAN IMMUNODEFICIENCY VIRUS
CGKEGHLAR

SEQ ID NO: 11325 - protein, 10 aa, HUMAN IMMUNODEFICIENCY VIRUS
YSPVSILDIR

SEQ ID NO: 11326 - protein, 10 aa, HUMAN IMMUNODEFICIENCY VIRUS
NFLGKIWPSH

SEQ ID NO: 11327 - protein, 8 aa, HUMAN IMMUNODEFICIENCY VIRUS
PVSILDIR

SEQ ID NO: 11328 - protein, 8 aa, HUMAN IMMUNODEFICIENCY VIRUS
LGKIWPSH

SEQ ID NO: 11329 - protein, 9 aa, HUMAN IMMUNODEFICIENCY VIRUS
KDTKEALDK

SEQ ID NO: 11330 - protein, 9 aa, HUMAN IMMUNODEFICIENCY VIRUS
FLGKIWPSH

SEQ ID NO: 11331 - protein, 11 aa, HUMAN IMMUNODEFICIENCY VIRUS
VSILDIRQGPK

SEQ ID NO: 11332 - protein, 11 aa, HUMAN IMMUNODEFICIENCY VIRUS
ANFLGKIWPSH

SEQ ID NO: 11333 - protein, 10 aa, HUMAN IMMUNODEFICIENCY VIRUS
LVWASRELER

SEQ ID NO: 11334 - protein, 11 aa, HUMAN IMMUNODEFICIENCY VIRUS
HLVWASRELER

SEQ ID NO: 11335 - protein, 9 aa, HUMAN IMMUNODEFICIENCY VIRUS
MVHQAISPR

SEQ ID NO: 11336 - protein, 9 aa, HUMAN IMMUNODEFICIENCY VIRUS
VDRFFKTLR

SEQ ID NO: 11337 - protein, 10 aa, HUMAN IMMUNODEFICIENCY VIRUS
QMVHQAISPR

SEQ ID NO: 11338 - protein, 10 aa, HUMAN IMMUNODEFICIENCY VIRUS
YVDRFFKTLR

SEQ ID NO: 11339 - protein, 10 aa, HUMAN IMMUNODEFICIENCY VIRUS
RAEQATQEVK

SEQ ID NO: 11340 - protein, 10 aa, HUMAN IMMUNODEFICIENCY VIRUS
ANPDCKTILK

SEQ ID NO: 11341 - protein, 11 aa, HUMAN IMMUNODEFICIENCY VIRUS
NANPDCKTILK

SEQ ID NO: 11342 - protein, 11 aa, HUMAN IMMUNODEFICIENCY VIRUS
KGRPGNFLQSR

SEQ ID NO: 11343 - protein, 8 aa, HUMAN IMMUNODEFICIENCY VIRUS
PDCKTILK

SEQ ID NO: 11344 - protein, 9 aa, HUMAN IMMUNODEFICIENCY VIRUS
VDRFYKTLR

SEQ ID NO: 11345 - protein, 10 aa, HUMAN IMMUNODEFICIENCY VIRUS
PFRDYVDRFY

SEQ ID NO: 11346 - protein, 10 aa, HUMAN IMMUNODEFICIENCY VIRUS
YVDRFYKTLR

SEQ ID NO: 11347 - protein, 11 aa, HUMAN IMMUNODEFICIENCY VIRUS
PFRDYVDRFYK

SEQ ID NO: 11348 - protein, 11 aa, HUMAN IMMUNODEFICIENCY VIRUS
GARASVLSGGK

SEQ ID NO: 11349 - protein, 8 aa, HUMAN IMMUNODEFICIENCY VIRUS
ASVLSGGK

SEQ ID NO: 11350 - protein, 8 aa, HUMAN IMMUNODEFICIENCY VIRUS
NLQGQMVH

SEQ ID NO: 11351 - protein, 8 aa, HUMAN IMMUNODEFICIENCY VIRUS
WVKVIEEK

SEQ ID NO: 11352 - protein, 8 aa, HUMAN IMMUNODEFICIENCY VIRUS
WDRLHPVH

SEQ ID NO: 11353 - protein, 8 aa, HUMAN IMMUNODEFICIENCY VIRUS
RDYVDRFY

SEQ ID NO: 11354 - protein, 9 aa, HUMAN IMMUNODEFICIENCY VIRUS
RASVLSGGK

SEQ ID NO: 11355 - protein, 9 aa, HUMAN IMMUNODEFICIENCY VIRUS
QNLQGQMVH

SEQ ID NO: 11356 - protein, 9 aa, HUMAN IMMUNODEFICIENCY VIRUS
RDYVDRFYK

SEQ ID NO: 11357 - protein, 10 aa, HUMAN IMMUNODEFICIENCY VIRUS
NAWVKVIEEK

SEQ ID NO: 11358 - protein, 11 aa, HUMAN IMMUNODEFICIENCY VIRUS
IVQNLQGQMVH

SEQ ID NO: 11359 - protein, 11 aa, HUMAN IMMUNODEFICIENCY VIRUS
LNAWVKVIEEK

SEQ ID NO: 11360 - protein, 11 aa, HUMAN IMMUNODEFICIENCY VIRUS
AAEWDRLHPVH

SEQ ID NO: 11361 - protein, 8 aa, HUMAN IMMUNODEFICIENCY VIRUS
PGNFLQSR

SEQ ID NO: 11362 - protein, 10 aa, HUMAN IMMUNODEFICIENCY VIRUS
NAWVKVVEEK

SEQ ID NO: 11363 - protein, 11 aa, HUMAN IMMUNODEFICIENCY VIRUS
KIRLRPGGKKK

SEQ ID NO: 11364 - protein, 11 aa, HUMAN IMMUNODEFICIENCY VIRUS
LNAWVKVVEEK

SEQ ID NO: 11365 - protein, 8 aa, HUMAN IMMUNODEFICIENCY VIRUS
WVKVVEEK

SEQ ID NO: 11366 - protein, 9 aa, HUMAN IMMUNODEFICIENCY VIRUS
RDYVDRFFK

SEQ ID NO: 11367 - protein, 9 aa, HUMAN IMMUNODEFICIENCY VIRUS
RNCRAPRKK

SEQ ID NO: 11368 - protein, 11 aa, HUMAN IMMUNODEFICIENCY VIRUS
PFRDYVDRFFK

SEQ ID NO: 11369 - protein, 8 aa, HUMAN IMMUNODEFICIENCY VIRUS
RNCRAPRK

SEQ ID NO: 11370 - protein, 9 aa, HUMAN IMMUNODEFICIENCY VIRUS
RLRPGGKKK

SEQ ID NO: 11371 - protein, 10 aa, HUMAN IMMUNODEFICIENCY VIRUS
RLRPGGKKKY

SEQ ID NO: 11372 - protein, 10 aa, HUMAN IMMUNODEFICIENCY VIRUS
PIPVGEIYKR

SEQ ID NO: 11373 - protein, 8 aa, HUMAN IMMUNODEFICIENCY VIRUS
PIPVGEIY

SEQ ID NO: 11374 - protein, 9 aa, HUMAN IMMUNODEFICIENCY VIRUS
PIPVGEIYK

SEQ ID NO: 11375 - protein, 8 aa, HUMAN IMMUNODEFICIENCY VIRUS
DTKEALDK

SEQ ID NO: 11376 - protein, 8 aa, HUMAN IMMUNODEFICIENCY VIRUS
QGVGGPGH

SEQ ID NO: 11377 - protein, 9 aa, HUMAN IMMUNODEFICIENCY VIRUS
QGVGGPGHK

SEQ ID NO: 11378 - protein, 10 aa, HUMAN IMMUNODEFICIENCY VIRUS
ACQGVGGPGH

SEQ ID NO: 11379 - protein, 11 aa, HUMAN IMMUNODEFICIENCY VIRUS
ISPRTLNAWVK

SEQ ID NO: 11380 - protein, 11 aa, HUMAN IMMUNODEFICIENCY VIRUS
TACQGVGGPGH

SEQ ID NO: 11381 - protein, 11 aa, HUMAN IMMUNODEFICIENCY VIRUS
ACQGVGGPGHK

SEQ ID NO: 11382 - protein, 11 aa, HUMAN IMMUNODEFICIENCY VIRUS
QGVGGPGHKAR

SEQ ID NO: 11383 - protein, 8 aa, HUMAN IMMUNODEFICIENCY VIRUS
GVGGPGHK

SEQ ID NO: 11384 - protein, 8 aa, HUMAN IMMUNODEFICIENCY VIRUS
GGPGHKAR

SEQ ID NO: 11385 - protein, 9 aa, HUMAN IMMUNODEFICIENCY VIRUS
VGGPGHKAR

SEQ ID NO: 11386 - protein, 10 aa, HUMAN IMMUNODEFICIENCY VIRUS
GVGGPGHKAR

SEQ ID NO: 11387 - protein, 8 aa, HUMAN IMMUNODEFICIENCY VIRUS
AAEWDRLH

SEQ ID NO: 11388 - protein, 9 aa, HUMAN IMMUNODEFICIENCY VIRUS
EAAEWDRLH

SEQ ID NO: 11389 - protein, 8 aa, HUMAN IMMUNODEFICIENCY VIRUS
PVGEIYKR

SEQ ID NO: 11390 - protein, 9 aa, HUMAN IMMUNODEFICIENCY VIRUS
TVATLYCVH

SEQ ID NO: 11391 - protein, 10 aa, HUMAN IMMUNODEFICIENCY VIRUS
NTVATLYCVH

SEQ ID NO: 11392 - protein, 10 aa, HUMAN IMMUNODEFICIENCY VIRUS
SILDIRQGPK

SEQ ID NO: 11393 - protein, 11 aa, HUMAN IMMUNODEFICIENCY VIRUS
DIRQGPKEPFR

SEQ ID NO: 11394 - protein, 8 aa, HUMAN IMMUNODEFICIENCY VIRUS
VATLYCVH

SEQ ID NO: 11395 - protein, 8 aa, HUMAN IMMUNODEFICIENCY VIRUS
LDIRQGPK

SEQ ID NO: 11396 - protein, 9 aa, HUMAN IMMUNODEFICIENCY VIRUS
ILDIRQGPK

SEQ ID NO: 11397 - protein, 10 aa, HUMAN IMMUNODEFICIENCY VIRUS
NTMLNTVGGH

SEQ ID NO: 11398 - protein, 11 aa, HUMAN IMMUNODEFICIENCY VIRUS
LNTMLNTVGGH

SEQ ID NO: 11399 - protein, 9 aa, HUMAN IMMUNODEFICIENCY VIRUS
TMLNTVGGH

SEQ ID NO: 11400 - protein, 8 aa, HUMAN IMMUNODEFICIENCY VIRUS
KGCWKCGK

SEQ ID NO: 11401 - protein, 9 aa, HUMAN IMMUNODEFICIENCY VIRUS
KIRLRPGGK

SEQ ID NO: 11402 - protein, 10 aa, HUMAN IMMUNODEFICIENCY VIRUS
KIRLRPGGKK

SEQ ID NO: 11403 - protein, 11 aa, HUMAN IMMUNODEFICIENCY VIRUS
KGCWKCGKEGH

SEQ ID NO: 11404 - protein, 8 aa, HUMAN IMMUNODEFICIENCY VIRUS
PGQMREPR

SEQ ID NO: 11405 - protein, 9 aa, HUMAN IMMUNODEFICIENCY VIRUS
CGKEGHQMK

SEQ ID NO: 11406 - protein, 10 aa, HUMAN IMMUNODEFICIENCY VIRUS
KCGKEGHQMK

SEQ ID NO: 11407 - protein, 8 aa, HUMAN IMMUNODEFICIENCY VIRUS
MLNTVGGH

SEQ ID NO: 11408 - protein, 8 aa, HUMAN IMMUNODEFICIENCY VIRUS
WASRELER

SEQ ID NO: 11409 - protein, 10 aa, HUMAN IMMUNODEFICIENCY VIRUS
GCWKCGKEGH

SEQ ID NO: 11410 - protein, 8 aa, HUMAN IMMUNODEFICIENCY VIRUS
RLRPGGKK

SEQ ID NO: 11411 - protein, 8 aa, HUMAN IMMUNODEFICIENCY VIRUS
QMKDCTER

SEQ ID NO: 11412 - protein, 11 aa, HUMAN IMMUNODEFICIENCY VIRUS
EGHQMKDCTER

SEQ ID NO: 11413 - protein, 10 aa, HUMAN IMMUNODEFICIENCY VIRUS
RAPRKKGCWK

SEQ ID NO: 11414 - protein, 11 aa, HUMAN IMMUNODEFICIENCY VIRUS
CTERQANFLGK

SEQ ID NO: 11415 - protein, 8 aa, HUMAN IMMUNODEFICIENCY VIRUS
NCRAPRKK

SEQ ID NO: 11416 - protein, 11 aa, HUMAN IMMUNODEFICIENCY VIRUS
TINEEAAEWDR

SEQ ID NO: 11417 - protein, 10 aa, HUMAN IMMUNODEFICIENCY VIRUS
INEEAAEWDR

SEQ ID NO: 11418 - protein, 8 aa, HUMAN IMMUNODEFICIENCY VIRUS
FNCGKEGH

SEQ ID NO: 11419 - protein, 8 aa, HUMAN IMMUNODEFICIENCY VIRUS
WIILGLNK

SEQ ID NO: 11420 - protein, 9 aa, HUMAN IMMUNODEFICIENCY VIRUS
CFNCGKEGH

SEQ ID NO: 11421 - protein, 10 aa, HUMAN IMMUNODEFICIENCY VIRUS
IILGLNKIVR

SEQ ID NO: 11422 - protein, 10 aa, HUMAN IMMUNODEFICIENCY VIRUS
KCFNCGKEGH

SEQ ID NO: 11423 - protein, 11 aa, HUMAN IMMUNODEFICIENCY VIRUS
WIILGLNKIVR

SEQ ID NO: 11424 - protein, 11 aa, HUMAN IMMUNODEFICIENCY VIRUS
ILGLNKIVRMY

SEQ ID NO: 11425 - protein, 9 aa, HUMAN IMMUNODEFICIENCY VIRUS
ILGLNKIVR

SEQ ID NO: 11426 - protein, 10 aa, HUMAN IMMUNODEFICIENCY VIRUS
LGLNKIVRMY

SEQ ID NO: 11427 - protein, 11 aa, HUMAN IMMUNODEFICIENCY VIRUS
LLVQNANPDCK

SEQ ID NO: 11428 - protein, 8 aa, HUMAN IMMUNODEFICIENCY VIRUS
LGLNKIVR

SEQ ID NO: 11429 - protein, 10 aa, HUMAN IMMUNODEFICIENCY VIRUS
LVQNANPDCK

SEQ ID NO: 11430 - protein, 8 aa, HUMAN IMMUNODEFICIENCY VIRUS
LNKIVRMY

SEQ ID NO: 11431 - protein, 9 aa, HUMAN IMMUNODEFICIENCY VIRUS
GLNKIVRMY

SEQ ID NO: 11432 - protein, 8 aa, HUMAN IMMUNODEFICIENCY VIRUS
QAAMQMLK

SEQ ID NO: 11433 - protein, 8 aa, HUMAN IMMUNODEFICIENCY VIRUS
QNANPDCK

SEQ ID NO: 11434 - protein, 11 aa, HUMAN IMMUNODEFICIENCY VIRUS
GGHQAAMQMLK

SEQ ID NO: 11435 - protein, 8 aa, HUMAN IMMUNODEFICIENCY VIRUS
RTLNAWVK

SEQ ID NO: 11436 - protein, 8 aa, HUMAN IMMUNODEFICIENCY VIRUS
QGPKEPFR

SEQ ID NO: 11437 - protein, 8 aa, HUMAN IMMUNODEFICIENCY VIRUS
PFRDYVDR

SEQ ID NO: 11438 - protein, 10 aa, HUMAN IMMUNODEFICIENCY VIRUS
QGPKEPFRDY

SEQ ID NO: 11439 - protein, 10 aa, HUMAN IMMUNODEFICIENCY VIRUS
AADGVGAVSR

SEQ ID NO: 11440 - protein, 11 aa, HUMAN IMMUNODEFICIENCY VIRUS
ANEGENNSLLH

SEQ ID NO: 11441 - protein, 9 aa, HUMAN IMMUNODEFICIENCY VIRUS
VGWPAIRER

SEQ ID NO: 11442 - protein, 8 aa, HUMAN IMMUNODEFICIENCY VIRUS
FDSRLAFH

SEQ ID NO: 11443 - protein, 9 aa, HUMAN IMMUNODEFICIENCY VIRUS
FDSRLAFHH

SEQ ID NO: 11444 - protein, 8 aa, HUMAN IMMUNODEFICIENCY VIRUS
DSRLAFHH

SEQ ID NO: 11445 - protein, 8 aa, HUMAN IMMUNODEFICIENCY VIRUS
AVSQDLDK

SEQ ID NO: 11446 - protein, 8 aa, HUMAN IMMUNODEFICIENCY VIRUS
PLRPMTFK

SEQ ID NO: 11447 - protein, 9 aa, HUMAN IMMUNODEFICIENCY VIRUS
GAVSQDLDK

SEQ ID NO: 11448 - protein, 9 aa, HUMAN IMMUNODEFICIENCY VIRUS
GLEGLIYSK

SEQ ID NO: 11449 - protein, 9 aa, HUMAN IMMUNODEFICIENCY VIRUS
MARELHPEY

SEQ ID NO: 11450 - protein, 10 aa, HUMAN IMMUNODEFICIENCY VIRUS
VGAVSQDLDK

SEQ ID NO: 11451 - protein, 10 aa, HUMAN IMMUNODEFICIENCY VIRUS
QVPLRPMTFK

SEQ ID NO: 11452 - protein, 10 aa, HUMAN IMMUNODEFICIENCY VIRUS
GAFDLSFFLK

SEQ ID NO: 11453 - protein, 10 aa, HUMAN IMMUNODEFICIENCY VIRUS
GGLEGLIYSK

SEQ ID NO: 11454 - protein, 10 aa, HUMAN IMMUNODEFICIENCY VIRUS
CFKLVPVDPR

SEQ ID NO: 11455 - protein, 10 aa, HUMAN IMMUNODEFICIENCY VIRUS
HMARELHPEY

SEQ ID NO: 11456 - protein, 10 aa, HUMAN IMMUNODEFICIENCY VIRUS
MARELHPEYY

SEQ ID NO: 11457 - protein, 11 aa, HUMAN IMMUNODEFICIENCY VIRUS
GVGAVSQDLDK

SEQ ID NO: 11458 - protein, 11 aa, HUMAN IMMUNODEFICIENCY VIRUS
KGAFDLSFFLK

SEQ ID NO: 11459 - protein, 11 aa, HUMAN IMMUNODEFICIENCY VIRUS
KGGLEGLIYSK

SEQ ID NO: 11460 - protein, 11 aa, HUMAN IMMUNODEFICIENCY VIRUS
WCFKLVPVDPR

SEQ ID NO: 11461 - protein, 11 aa, HUMAN IMMUNODEFICIENCY VIRUS
NNSLLHPICQH

SEQ ID NO: 11462 - protein, 11 aa, HUMAN IMMUNODEFICIENCY VIRUS
HMARELHPEYY

SEQ ID NO: 11463 - protein, 11 aa, HUMAN IMMUNODEFICIENCY VIRUS
MARELHPEYYK

SEQ ID NO: 11464 - protein, 11 aa, HUMAN IMMUNODEFICIENCY VIRUS
ANEGENNCLLH

SEQ ID NO: 11465 - protein, 8 aa, HUMAN IMMUNODEFICIENCY VIRUS
AVSRDLEK

SEQ ID NO: 11466 - protein, 8 aa, HUMAN IMMUNODEFICIENCY VIRUS
VSRDLEKH

SEQ ID NO: 11467 - protein, 8 aa, HUMAN IMMUNODEFICIENCY VIRUS
KLVPVDPR

SEQ ID NO: 11468 - protein, 9 aa, HUMAN IMMUNODEFICIENCY VIRUS
GAVSRDLEK

SEQ ID NO: 11469 - protein, 9 aa, HUMAN IMMUNODEFICIENCY VIRUS
AVSRDLEKH

SEQ ID NO: 11470 - protein, 10 aa, HUMAN IMMUNODEFICIENCY VIRUS
VGAVSRDLEK

SEQ ID NO: 11471 - protein, 10 aa, HUMAN IMMUNODEFICIENCY VIRUS
GAVSRDLEKH

SEQ ID NO: 11472 - protein, 10 aa, HUMAN IMMUNODEFICIENCY VIRUS
QNYTPGPGVR

SEQ ID NO: 11473 - protein, 10 aa, HUMAN IMMUNODEFICIENCY VIRUS
NSLLHPICQH

SEQ ID NO: 11474 - protein, 11 aa, HUMAN IMMUNODEFICIENCY VIRUS
GVGAVSRDLEK

SEQ ID NO: 11475 - protein, 11 aa, HUMAN IMMUNODEFICIENCY VIRUS
VGAVSRDLEKH

SEQ ID NO: 11476 - protein, 9 aa, HUMAN IMMUNODEFICIENCY VIRUS
EGENNCLLH

SEQ ID NO: 11477 - protein, 8 aa, HUMAN IMMUNODEFICIENCY VIRUS
YTPGPGVR

SEQ ID NO: 11478 - protein, 9 aa, HUMAN IMMUNODEFICIENCY VIRUS
DILDLWVYH

SEQ ID NO: 11479 - protein, 10 aa, HUMAN IMMUNODEFICIENCY VIRUS
QDILDLWVYH

SEQ ID NO: 11480 - protein, 9 aa, HUMAN IMMUNODEFICIENCY VIRUS
EGENNSLLH

SEQ ID NO: 11481 - protein, 10 aa, HUMAN IMMUNODEFICIENCY VIRUS
VDLSHFLKEK

SEQ ID NO: 11482 - protein, 11 aa, HUMAN IMMUNODEFICIENCY VIRUS
AVDLSHFLKEK

SEQ ID NO: 11483 - protein, 8 aa, HUMAN IMMUNODEFICIENCY VIRUS
VDLSHFLK

SEQ ID NO: 11484 - protein, 8 aa, HUMAN IMMUNODEFICIENCY VIRUS
DGLIYSKK

SEQ ID NO: 11485 - protein, 8 aa, HUMAN IMMUNODEFICIENCY VIRUS
ELHPEFYK

SEQ ID NO: 11486 - protein, 9 aa, HUMAN IMMUNODEFICIENCY VIRUS
AVDLSHFLK

SEQ ID NO: 11487 - protein, 9 aa, HUMAN IMMUNODEFICIENCY VIRUS
LDGLIYSKK

SEQ ID NO: 11488 - protein, 9 aa, HUMAN IMMUNODEFICIENCY VIRUS
DGLIYSKKR

SEQ ID NO: 11489 - protein, 9 aa, HUMAN IMMUNODEFICIENCY VIRUS
SLLHPICQH

SEQ ID NO: 11490 - protein, 10 aa, HUMAN IMMUNODEFICIENCY VIRUS
GLDGLIYSKK

SEQ ID NO: 11491 - protein, 10 aa, HUMAN IMMUNODEFICIENCY VIRUS
LDGLIYSKKR

SEQ ID NO: 11492 - protein, 11 aa, HUMAN IMMUNODEFICIENCY VIRUS
GGLDGLIYSKK

SEQ ID NO: 11493 - protein, 11 aa, HUMAN IMMUNODEFICIENCY VIRUS
GLDGLIYSKKR

SEQ ID NO: 11494 - protein, 11 aa, HUMAN IMMUNODEFICIENCY VIRUS
NNCLLHPMSQH

SEQ ID NO: 11495 - protein, 9 aa, HUMAN IMMUNODEFICIENCY VIRUS
CLLHPMSQH

SEQ ID NO: 11496 - protein, 10 aa, HUMAN IMMUNODEFICIENCY VIRUS
NCLLHPMSQH

SEQ ID NO: 11497 - protein, 11 aa, HUMAN IMMUNODEFICIENCY VIRUS
QNYTPGPGIRY

SEQ ID NO: 11498 - protein, 8 aa, HUMAN IMMUNODEFICIENCY VIRUS
LDGLIYSK

SEQ ID NO: 11499 - protein, 9 aa, HUMAN IMMUNODEFICIENCY VIRUS
GLDGLIYSK

SEQ ID NO: 11500 - protein, 10 aa, HUMAN IMMUNODEFICIENCY VIRUS
GGLDGLIYSK

SEQ ID NO: 11501 - protein, 11 aa, HUMAN IMMUNODEFICIENCY VIRUS
KGGLDGLIYSK

SEQ ID NO: 11502 - protein, 11 aa, HUMAN IMMUNODEFICIENCY VIRUS
RFPLTFGWCFK

SEQ ID NO: 11503 - protein, 8 aa, HUMAN IMMUNODEFICIENCY VIRUS
FFPDWQNY

SEQ ID NO: 11504 - protein, 8 aa, HUMAN IMMUNODEFICIENCY VIRUS
LLHPMSQH

SEQ ID NO: 11505 - protein, 9 aa, HUMAN IMMUNODEFICIENCY VIRUS
GFFPDWQNY

SEQ ID NO: 11506 - protein, 9 aa, HUMAN IMMUNODEFICIENCY VIRUS
YTPGPGIRY

SEQ ID NO: 11507 - protein, 10 aa, HUMAN IMMUNODEFICIENCY VIRUS
FDLSFFLKEK

SEQ ID NO: 11508 - protein, 10 aa, HUMAN IMMUNODEFICIENCY VIRUS
QGFFPDWQNY

SEQ ID NO: 11509 - protein, 11 aa, HUMAN IMMUNODEFICIENCY VIRUS
AFDLSFFLKEK

SEQ ID NO: 11510 - protein, 8 aa, HUMAN IMMUNODEFICIENCY VIRUS
FDLSFFLK

SEQ ID NO: 11511 - protein, 8 aa, HUMAN IMMUNODEFICIENCY VIRUS
LLHPICQH

SEQ ID NO: 11512 - protein, 9 aa, HUMAN IMMUNODEFICIENCY VIRUS
AFDLSFFLK

SEQ ID NO: 11513 - protein, 10 aa, HUMAN IMMUNODEFICIENCY VIRUS
QNYTPGPGIR

SEQ ID NO: 11514 - protein, 8 aa, HUMAN IMMUNODEFICIENCY VIRUS
GGLEGLIY

SEQ ID NO: 11515 - protein, 9 aa, HUMAN IMMUNODEFICIENCY VIRUS
KGGLEGLIY

SEQ ID NO: 11516 - protein, 8 aa, HUMAN IMMUNODEFICIENCY VIRUS
DILDLWVY

SEQ ID NO: 11517 - protein, 8 aa, HUMAN IMMUNODEFICIENCY VIRUS
YTPGPGIR

SEQ ID NO: 11518 - protein, 9 aa, HUMAN IMMUNODEFICIENCY VIRUS
QDILDLWVY

SEQ ID NO: 11519 - protein, 10 aa, HUMAN IMMUNODEFICIENCY VIRUS
QNYTPGPGTR

SEQ ID NO: 11520 - protein, 8 aa, HUMAN IMMUNODEFICIENCY VIRUS
GGLDGLIY

SEQ ID NO: 11521 - protein, 8 aa, HUMAN IMMUNODEFICIENCY VIRUS
WVYHTQGY

SEQ ID NO: 11522 - protein, 8 aa, HUMAN IMMUNODEFICIENCY VIRUS
YTPGPGTR

SEQ ID NO: 11523 - protein, 9 aa, HUMAN IMMUNODEFICIENCY VIRUS
KGGLDGLIY

SEQ ID NO: 11524 - protein, 10 aa, HUMAN IMMUNODEFICIENCY VIRUS
DLWVYHTQGY

SEQ ID NO: 11525 - protein, 11 aa, HUMAN IMMUNODEFICIENCY VIRUS
LDLWVYHTQGY

SEQ ID NO: 11526 - protein, 8 aa, HUMAN IMMUNODEFICIENCY VIRUS
LSFFLKEK

SEQ ID NO: 11527 - protein, 8 aa, HUMAN IMMUNODEFICIENCY VIRUS
ELHPEYYK

SEQ ID NO: 11528 - protein, 9 aa, HUMAN IMMUNODEFICIENCY VIRUS
DLSFFLKEK

SEQ ID NO: 11529 - protein, 9 aa, HUMAN IMMUNODEFICIENCY VIRUS
EILDLWVYH

SEQ ID NO: 11530 - protein, 8 aa, HUMAN IMMUNODEFICIENCY VIRUS
GLIYSKKR

SEQ ID NO: 11531 - protein, 8 aa, HUMAN IMMUNODEFICIENCY VIRUS
LSHFLKEK

SEQ ID NO: 11532 - protein, 9 aa, HUMAN IMMUNODEFICIENCY VIRUS
DLSHFLKEK

SEQ ID NO: 11533 - protein, 8 aa, HUMAN IMMUNODEFICIENCY VIRUS
EILDLWVY

SEQ ID NO: 11534 - protein, 8 aa, HUMAN IMMUNODEFICIENCY VIRUS
ILDLWVYH

SEQ ID NO: 11535 - protein, 8 aa, HUMAN IMMUNODEFICIENCY VIRUS
YFPDWQNY

SEQ ID NO: 11536 - protein, 10 aa, HUMAN IMMUNODEFICIENCY VIRUS
QGYFPDWQNY

SEQ ID NO: 11537 - protein, 8 aa, HUMAN IMMUNODEFICIENCY VIRUS
LTFGWCFK

SEQ ID NO: 11538 - protein, 9 aa, HUMAN IMMUNODEFICIENCY VIRUS
PLTFGWCFK

SEQ ID NO: 11539 - protein, 9 aa, HUMAN IMMUNODEFICIENCY VIRUS
QVPLRPMTY

SEQ ID NO: 11540 - protein, 10 aa, HUMAN IMMUNODEFICIENCY VIRUS
QVPLRPMTYK

SEQ ID NO: 11541 - protein, 9 aa, HUMAN IMMUNODEFICIENCY VIRUS
PVRPQVPLR

SEQ ID NO: 11542 - protein, 11 aa, HUMAN IMMUNODEFICIENCY VIRUS
GFPVRPQVPLR

SEQ ID NO: 11543 - protein, 8 aa, HUMAN IMMUNODEFICIENCY VIRUS
PLRPMTYK

SEQ ID NO: 11544 - protein, 8 aa, HUMAN IMMUNODEFICIENCY VIRUS
STNSPTSR

SEQ ID NO: 11545 - protein, 8 aa, HUMAN IMMUNODEFICIENCY VIRUS
RANSPSSR

SEQ ID NO: 11546 - protein, 9 aa, HUMAN IMMUNODEFICIENCY VIRUS
NSTNSPTSR

SEQ ID NO: 11547 - protein, 9 aa, HUMAN IMMUNODEFICIENCY VIRUS
PTSRELQVR

SEQ ID NO: 11548 - protein, 10 aa, HUMAN IMMUNODEFICIENCY VIRUS
QTRANSPSSR

SEQ ID NO: 11549 - protein, 10 aa, HUMAN IMMUNODEFICIENCY VIRUS
QTRANSPTTR

SEQ ID NO: 11550 - protein, 11 aa, HUMAN IMMUNODEFICIENCY VIRUS
NSPTSRELQVR

SEQ ID NO: 11551 - protein, 8 aa, HUMAN IMMUNODEFICIENCY VIRUS
RANSPTTR

SEQ ID NO: 11552 - protein, 9 aa, HUMAN IMMUNODEFICIENCY VIRUS
PSSRELQVR

SEQ ID NO: 11553 - protein, 10 aa, HUMAN IMMUNODEFICIENCY VIRUS
PSRANSPTSR

SEQ ID NO: 11554 - protein, 11 aa, HUMAN IMMUNODEFICIENCY VIRUS
NSPSSRELQVR

SEQ ID NO: 11555 - protein, 11 aa, HUMAN IMMUNODEFICIENCY VIRUS
NSPTTRELQVR

SEQ ID NO: 11556 - protein, 11 aa, HUMAN IMMUNODEFICIENCY VIRUS
NNSLSEAGADR

SEQ ID NO: 11557 - protein, 10 aa, HUMAN IMMUNODEFICIENCY VIRUS
NLAFPQGEAR

SEQ ID NO: 11558 - protein, 8 aa, HUMAN IMMUNODEFICIENCY VIRUS
ILIEICGH

SEQ ID NO: 11559 - protein, 8 aa, HUMAN IMMUNODEFICIENCY VIRUS
LIEICGHK

SEQ ID NO: 11560 - protein, 8 aa, HUMAN IMMUNODEFICIENCY VIRUS
YAKMRTAH

SEQ ID NO: 11561 - protein, 9 aa, HUMAN IMMUNODEFICIENCY VIRUS
RSAHTNDVK

SEQ ID NO: 11562 - protein, 10 aa, HUMAN IMMUNODEFICIENCY VIRUS
ETWETWWTDY

SEQ ID NO: 11563 - protein, 10 aa, HUMAN IMMUNODEFICIENCY VIRUS
ETWETWWTEY

SEQ ID NO: 11564 - protein, 10 aa, HUMAN IMMUNODEFICIENCY VIRUS
VSLTDTTNQK

SEQ ID NO: 11565 - protein, 11 aa, HUMAN IMMUNODEFICIENCY VIRUS
ENLAFPQGEAR

SEQ ID NO: 11566 - protein, 11 aa, HUMAN IMMUNODEFICIENCY VIRUS
TGKYAKMRTAH

SEQ ID NO: 11567 - protein, 11 aa, HUMAN IMMUNODEFICIENCY VIRUS
VVSLTDTTNQK

SEQ ID NO: 11568 - protein, 11 aa, HUMAN IMMUNODEFICIENCY VIRUS
QTKELQKQIIK

SEQ ID NO: 11569 - protein, 10 aa, HUMAN IMMUNODEFICIENCY VIRUS
QTRANSPTRR

SEQ ID NO: 11570 - protein, 9 aa, HUMAN IMMUNODEFICIENCY VIRUS
TNNETPGIR

SEQ ID NO: 11571 - protein, 10 aa, HUMAN IMMUNODEFICIENCY VIRUS
TNNETPGIRY

SEQ ID NO: 11572 - protein, 11 aa, HUMAN IMMUNODEFICIENCY VIRUS
LDGIDKAQEDH

SEQ ID NO: 11573 - protein, 8 aa, HUMAN IMMUNODEFICIENCY VIRUS
IGGFIKVK

SEQ ID NO: 11574 - protein, 8 aa, HUMAN IMMUNODEFICIENCY VIRUS
RIGPENPY

SEQ ID NO: 11575 - protein, 8 aa, HUMAN IMMUNODEFICIENCY VIRUS
TAHTNDVK

SEQ ID NO: 11576 - protein, 8 aa, HUMAN IMMUNODEFICIENCY VIRUS
QLTEVVQK

SEQ ID NO: 11577 - protein, 8 aa, HUMAN IMMUNODEFICIENCY VIRUS
IDKAQEDH

SEQ ID NO: 11578 - protein, 8 aa, HUMAN IMMUNODEFICIENCY VIRUS
VVPRRKVK

SEQ ID NO: 11579 - protein, 8 aa, HUMAN IMMUNODEFICIENCY VIRUS
KIIKDYGK

SEQ ID NO: 11580 - protein, 9 aa, HUMAN IMMUNODEFICIENCY VIRUS
GIGGFIKVK

SEQ ID NO: 11581 - protein, 9 aa, HUMAN IMMUNODEFICIENCY VIRUS
SLTDTTNQK

SEQ ID NO: 11582 - protein, 9 aa, HUMAN IMMUNODEFICIENCY VIRUS
GIDKAQEDH

SEQ ID NO: 11583 - protein, 9 aa, HUMAN IMMUNODEFICIENCY VIRUS
SNFTSTTVK

SEQ ID NO: 11584 - protein, 9 aa, HUMAN IMMUNODEFICIENCY VIRUS
KVVPRRKVK

SEQ ID NO: 11585 - protein, 10 aa, HUMAN IMMUNODEFICIENCY VIRUS
GGIGGFIKVK

SEQ ID NO: 11586 - protein, 10 aa, HUMAN IMMUNODEFICIENCY VIRUS
ISRIGPENPY

SEQ ID NO: 11587 - protein, 10 aa, HUMAN IMMUNODEFICIENCY VIRUS
STNNETPGIR

SEQ ID NO: 11588 - protein, 10 aa, HUMAN IMMUNODEFICIENCY VIRUS
ESWTVNDIQK

SEQ ID NO: 11589 - protein, 10 aa, HUMAN IMMUNODEFICIENCY VIRUS
ETTNQKTELH

SEQ ID NO: 11590 - protein, 10 aa, HUMAN IMMUNODEFICIENCY VIRUS
DGIDKAQEDH

SEQ ID NO: 11591 - protein, 10 aa, HUMAN IMMUNODEFICIENCY VIRUS
GSNFTSTTVK

SEQ ID NO: 11592 - protein, 10 aa, HUMAN IMMUNODEFICIENCY VIRUS
GIQQEFGIPY

SEQ ID NO: 11593 - protein, 10 aa, HUMAN IMMUNODEFICIENCY VIRUS
SDIQTKELQK

SEQ ID NO: 11594 - protein, 11 aa, HUMAN IMMUNODEFICIENCY VIRUS
FNFPQITLWQR

SEQ ID NO: 11595 - protein, 11 aa, HUMAN IMMUNODEFICIENCY VIRUS
IGGIGGFIKVK

SEQ ID NO: 11596 - protein, 11 aa, HUMAN IMMUNODEFICIENCY VIRUS
KISRIGPENPY

SEQ ID NO: 11597 - protein, 11 aa, HUMAN IMMUNODEFICIENCY VIRUS
PSTNNETPGIR

SEQ ID NO: 11598 - protein, 11 aa, HUMAN IMMUNODEFICIENCY VIRUS
STNNETPGIRY

SEQ ID NO: 11599 - protein, 11 aa, HUMAN IMMUNODEFICIENCY VIRUS
VVSLTETTNQK

SEQ ID NO: 11600 - protein, 11 aa, HUMAN IMMUNODEFICIENCY VIRUS
NGSNFTSTTVK

SEQ ID NO: 11601 - protein, 11 aa, HUMAN IMMUNODEFICIENCY VIRUS
AGIQQEFGIPY

SEQ ID NO: 11602 - protein, 11 aa, HUMAN IMMUNODEFICIENCY VIRUS
IDIIASDIQTK

SEQ ID NO: 11603 - protein, 11 aa, HUMAN IMMUNODEFICIENCY VIRUS
VDIIATDIQTK

SEQ ID NO: 11604 - protein, 11 aa, HUMAN IMMUNODEFICIENCY VIRUS
ASDIQTKELQK

SEQ ID NO: 11605 - protein, 11 aa, HUMAN IMMUNODEFICIENCY VIRUS
NSEIKVVPRRK

SEQ ID NO: 11606 - protein, 10 aa, HUMAN IMMUNODEFICIENCY VIRUS
QTRANSPTSR

SEQ ID NO: 11607 - protein, 8 aa, HUMAN IMMUNODEFICIENCY VIRUS
IIKIQNFR

SEQ ID NO: 11608 - protein, 9 aa, HUMAN IMMUNODEFICIENCY VIRUS
QIYPGIKVK

SEQ ID NO: 11609 - protein, 9 aa, HUMAN IMMUNODEFICIENCY VIRUS
QDQWTYQIY

SEQ ID NO: 11610 - protein, 10 aa, HUMAN IMMUNODEFICIENCY VIRUS
IIKIQNFRVY

SEQ ID NO: 11611 - protein, 11 aa, HUMAN IMMUNODEFICIENCY VIRUS
ASQIYPGIKVK

SEQ ID NO: 11612 - protein, 11 aa, HUMAN IMMUNODEFICIENCY VIRUS
IIKIQNFRVYY

SEQ ID NO: 11613 - protein, 8 aa, HUMAN IMMUNODEFICIENCY VIRUS
AFPQGEAR

SEQ ID NO: 11614 - protein, 8 aa, HUMAN IMMUNODEFICIENCY VIRUS
TNQKTELH

SEQ ID NO: 11615 - protein, 8 aa, HUMAN IMMUNODEFICIENCY VIRUS
KTELQAIY

SEQ ID NO: 11616 - protein, 9 aa, HUMAN IMMUNODEFICIENCY VIRUS
LAFPQGEAR

SEQ ID NO: 11617 - protein, 9 aa, HUMAN IMMUNODEFICIENCY VIRUS
EINLPGKWK

SEQ ID NO: 11618 - protein, 9 aa, HUMAN IMMUNODEFICIENCY VIRUS
TTNQKTELH

SEQ ID NO: 11619 - protein, 9 aa, HUMAN IMMUNODEFICIENCY VIRUS
QIIKIQNFR

SEQ ID NO: 11620 - protein, 9 aa, HUMAN IMMUNODEFICIENCY VIRUS
VIQDNSEIK

SEQ ID NO: 11621 - protein, 9 aa, HUMAN IMMUNODEFICIENCY VIRUS
NSEIKVVPR

SEQ ID NO: 11622 - protein, 10 aa, HUMAN IMMUNODEFICIENCY VIRUS
VLEEINLPGK

SEQ ID NO: 11623 - protein, 10 aa, HUMAN IMMUNODEFICIENCY VIRUS
VVIQDNSEIK

SEQ ID NO: 11624 - protein, 10 aa, HUMAN IMMUNODEFICIENCY VIRUS
DNSEIKVVPR

SEQ ID NO: 11625 - protein, 10 aa, HUMAN IMMUNODEFICIENCY VIRUS
NSEIKVVPRR

SEQ ID NO: 11626 - protein, 11 aa, HUMAN IMMUNODEFICIENCY VIRUS
TVLEEINLPGK

SEQ ID NO: 11627 - protein, 11 aa, HUMAN IMMUNODEFICIENCY VIRUS
EINLPGKWKPK

SEQ ID NO: 11628 - protein, 11 aa, HUMAN IMMUNODEFICIENCY VIRUS
QGQDQWTYQIY

SEQ ID NO: 11629 - protein, 11 aa, HUMAN IMMUNODEFICIENCY VIRUS
RMRGAHTNDVK

SEQ ID NO: 11630 - protein, 11 aa, HUMAN IMMUNODEFICIENCY VIRUS
TNQKTELQAIY

SEQ ID NO: 11631 - protein, 11 aa, HUMAN IMMUNODEFICIENCY VIRUS
QIIKIQNFRVY

SEQ ID NO: 11632 - protein, 11 aa, HUMAN IMMUNODEFICIENCY VIRUS
AVVIQDNSEIK

SEQ ID NO: 11633 - protein, 11 aa, HUMAN IMMUNODEFICIENCY VIRUS
QDNSEIKVVPR

SEQ ID NO: 11634 - protein, 11 aa, HUMAN IMMUNODEFICIENCY VIRUS
DNSEIKVVPRR

SEQ ID NO: 11635 - protein, 8 aa, HUMAN IMMUNODEFICIENCY VIRUS
ELQKQIIK

SEQ ID NO: 11636 - protein, 9 aa, HUMAN IMMUNODEFICIENCY VIRUS
KTGKYARMR

SEQ ID NO: 11637 - protein, 11 aa, HUMAN IMMUNODEFICIENCY VIRUS
NLKTGKYARMR

SEQ ID NO: 11638 - protein, 8 aa, HUMAN IMMUNODEFICIENCY VIRUS
EDINLPGK

SEQ ID NO: 11639 - protein, 8 aa, HUMAN IMMUNODEFICIENCY VIRUS
TGKYARMR

SEQ ID NO: 11640 - protein, 8 aa, HUMAN IMMUNODEFICIENCY VIRUS
YARMRGAH

SEQ ID NO: 11641 - protein, 8 aa, HUMAN IMMUNODEFICIENCY VIRUS
QVREQAEH

SEQ ID NO: 11642 - protein, 9 aa, HUMAN IMMUNODEFICIENCY VIRUS
DINLPGKWK

SEQ ID NO: 11643 - protein, 10 aa, HUMAN IMMUNODEFICIENCY VIRUS
VLEDINLPGK

SEQ ID NO: 11644 - protein, 10 aa, HUMAN IMMUNODEFICIENCY VIRUS
EDINLPGKWK

SEQ ID NO: 11645 - protein, 10 aa, HUMAN IMMUNODEFICIENCY VIRUS
RAKIEELREH

SEQ ID NO: 11646 - protein, 10 aa, HUMAN IMMUNODEFICIENCY VIRUS
TVQPIVLPEK

SEQ ID NO: 11647 - protein, 10 aa, HUMAN IMMUNODEFICIENCY VIRUS
AGRWPVKTIH

SEQ ID NO: 11648 - protein, 10 aa, HUMAN IMMUNODEFICIENCY VIRUS
IGQVREQAEH

SEQ ID NO: 11649 - protein, 10 aa, HUMAN IMMUNODEFICIENCY VIRUS
QVREQAEHLK

SEQ ID NO: 11650 - protein, 11 aa, HUMAN IMMUNODEFICIENCY VIRUS
TLWQRPLVTVK

SEQ ID NO: 11651 - protein, 11 aa, HUMAN IMMUNODEFICIENCY VIRUS
LVTIKIGGQLK

SEQ ID NO: 11652 - protein, 11 aa, HUMAN IMMUNODEFICIENCY VIRUS
TVLEDINLPGK

SEQ ID NO: 11653 - protein, 11 aa, HUMAN IMMUNODEFICIENCY VIRUS
DINLPGKWKPK

SEQ ID NO: 11654 - protein, 11 aa, HUMAN IMMUNODEFICIENCY VIRUS
KIEELREHLLK

SEQ ID NO: 11655 - protein, 11 aa, HUMAN IMMUNODEFICIENCY VIRUS
WTVQPIVLPEK

SEQ ID NO: 11656 - protein, 11 aa, HUMAN IMMUNODEFICIENCY VIRUS
TGKYARMRGAH

SEQ ID NO: 11657 - protein, 11 aa, HUMAN IMMUNODEFICIENCY VIRUS
LAGRWPVKTIH

SEQ ID NO: 11658 - protein, 11 aa, HUMAN IMMUNODEFICIENCY VIRUS
IIGQVREQAEH

SEQ ID NO: 11659 - protein, 11 aa, HUMAN IMMUNODEFICIENCY VIRUS
EIKVVPRRKAK

SEQ ID NO: 11660 - protein, 8 aa, HUMAN IMMUNODEFICIENCY VIRUS
EFSSEQTR

SEQ ID NO: 11661 - protein, 9 aa, HUMAN IMMUNODEFICIENCY VIRUS
QIYPGIKVR

SEQ ID NO: 11662 - protein, 11 aa, HUMAN IMMUNODEFICIENCY VIRUS
ASQIYPGIKVR

SEQ ID NO: 11663 - protein, 11 aa, HUMAN IMMUNODEFICIENCY VIRUS
IATESIVIWGK

SEQ ID NO: 11664 - protein, 8 aa, HUMAN IMMUNODEFICIENCY VIRUS
ILIEICGK

SEQ ID NO: 11665 - protein, 8 aa, HUMAN IMMUNODEFICIENCY VIRUS
LIEICGKK

SEQ ID NO: 11666 - protein, 8 aa, HUMAN IMMUNODEFICIENCY VIRUS
QNPDIVIY

SEQ ID NO: 11667 - protein, 8 aa, HUMAN IMMUNODEFICIENCY VIRUS
NFTSTTVK

SEQ ID NO: 11668 - protein, 8 aa, HUMAN IMMUNODEFICIENCY VIRUS
IASDIQTK

SEQ ID NO: 11669 - protein, 8 aa, HUMAN IMMUNODEFICIENCY VIRUS
DSRDPLWK

SEQ ID NO: 11670 - protein, 9 aa, HUMAN IMMUNODEFICIENCY VIRUS
QILIEICGK

SEQ ID NO: 11671 - protein, 9 aa, HUMAN IMMUNODEFICIENCY VIRUS
ILIEICGKK

SEQ ID NO: 11672 - protein, 9 aa, HUMAN IMMUNODEFICIENCY VIRUS
IIASDIQTK

SEQ ID NO: 11673 - protein, 9 aa, HUMAN IMMUNODEFICIENCY VIRUS
RDSRDPLWK

SEQ ID NO: 11674 - protein, 10 aa, HUMAN IMMUNODEFICIENCY VIRUS
QILIEICGKK

SEQ ID NO: 11675 - protein, 10 aa, HUMAN IMMUNODEFICIENCY VIRUS
QNPDIVIYQY

SEQ ID NO: 11676 - protein, 10 aa, HUMAN IMMUNODEFICIENCY VIRUS
RTKIEELRQH

SEQ ID NO: 11677 - protein, 10 aa, HUMAN IMMUNODEFICIENCY VIRUS
PGIKVRQLCK

SEQ ID NO: 11678 - protein, 10 aa, HUMAN IMMUNODEFICIENCY VIRUS
DIIASDIQTK

SEQ ID NO: 11679 - protein, 10 aa, HUMAN IMMUNODEFICIENCY VIRUS
RDPLWKGPAK

SEQ ID NO: 11680 - protein, 11 aa, HUMAN IMMUNODEFICIENCY VIRUS
FSFPQITLWQR

SEQ ID NO: 11681 - protein, 11 aa, HUMAN IMMUNODEFICIENCY VIRUS
YDQILIEICGK

SEQ ID NO: 11682 - protein, 11 aa, HUMAN IMMUNODEFICIENCY VIRUS
KTPKFKLPIQK

SEQ ID NO: 11683 - protein, 11 aa, HUMAN IMMUNODEFICIENCY VIRUS
GIDKAQEEHER

SEQ ID NO: 11684 - protein, 9 aa, HUMAN IMMUNODEFICIENCY VIRUS
QTRANSPTR

SEQ ID NO: 11685 - protein, 10 aa, HUMAN IMMUNODEFICIENCY VIRUS
LVEICTEMEK

SEQ ID NO: 11686 - protein, 8 aa, HUMAN IMMUNODEFICIENCY VIRUS
ELRQHLLR

SEQ ID NO: 11687 - protein, 8 aa, HUMAN IMMUNODEFICIENCY VIRUS
QGQDQWTY

SEQ ID NO: 11688 - protein, 8 aa, HUMAN IMMUNODEFICIENCY VIRUS
KTELQAIH

SEQ ID NO: 11689 - protein, 9 aa, HUMAN IMMUNODEFICIENCY VIRUS
EIKVVPRRK

SEQ ID NO: 11690 - protein, 10 aa, HUMAN IMMUNODEFICIENCY VIRUS
LGIIQAQPDR

SEQ ID NO: 11691 - protein, 10 aa, HUMAN IMMUNODEFICIENCY VIRUS
VDKLVSAGIR

SEQ ID NO: 11692 - protein, 10 aa, HUMAN IMMUNODEFICIENCY VIRUS
IDKAQEEHER

SEQ ID NO: 11693 - protein, 11 aa, HUMAN IMMUNODEFICIENCY VIRUS
ALVEICTEMEK

SEQ ID NO: 11694 - protein, 11 aa, HUMAN IMMUNODEFICIENCY VIRUS
KIEELRQHLLR

SEQ ID NO: 11695 - protein, 11 aa, HUMAN IMMUNODEFICIENCY VIRUS
TNQKTELQAIH

SEQ ID NO: 11696 - protein, 11 aa, HUMAN IMMUNODEFICIENCY VIRUS
ALGIIQAQPDR

SEQ ID NO: 11697 - protein, 11 aa, HUMAN IMMUNODEFICIENCY VIRUS
LVNQIIEQLIK

SEQ ID NO: 11698 - protein, 11 aa, HUMAN IMMUNODEFICIENCY VIRUS
QVDKLVSAGIR

SEQ ID NO: 11699 - protein, 11 aa, HUMAN IMMUNODEFICIENCY VIRUS
VDKLVSAGIRK

SEQ ID NO: 11700 - protein, 11 aa, HUMAN IMMUNODEFICIENCY VIRUS
IDKAQEEHERY

SEQ ID NO: 11701 - protein, 8 aa, HUMAN IMMUNODEFICIENCY VIRUS
KAQEEHER

SEQ ID NO: 11702 - protein, 9 aa, HUMAN IMMUNODEFICIENCY VIRUS
KAQEEHERY

SEQ ID NO: 11703 - protein, 10 aa, HUMAN IMMUNODEFICIENCY VIRUS
NLAFQQGEAR

SEQ ID NO: 11704 - protein, 10 aa, HUMAN IMMUNODEFICIENCY VIRUS
KAQEEHERYH

SEQ ID NO: 11705 - protein, 8 aa, HUMAN IMMUNODEFICIENCY VIRUS
AFQQGEAR

SEQ ID NO: 11706 - protein, 8 aa, HUMAN IMMUNODEFICIENCY VIRUS
RANSPTRR

SEQ ID NO: 11707 - protein, 8 aa, HUMAN IMMUNODEFICIENCY VIRUS
SAHTNDVK

SEQ ID NO: 11708 - protein, 8 aa, HUMAN IMMUNODEFICIENCY VIRUS
IIQAQPDR

SEQ ID NO: 11709 - protein, 8 aa, HUMAN IMMUNODEFICIENCY VIRUS
KLVSAGIR

SEQ ID NO: 11710 - protein, 8 aa, HUMAN IMMUNODEFICIENCY VIRUS
LVSAGIRK

SEQ ID NO: 11711 - protein, 8 aa, HUMAN IMMUNODEFICIENCY VIRUS
EIKVVPRR

SEQ ID NO: 11712 - protein, 9 aa, HUMAN IMMUNODEFICIENCY VIRUS
LAFQQGEAR

SEQ ID NO: 11713 - protein, 9 aa, HUMAN IMMUNODEFICIENCY VIRUS
GIIQAQPDR

SEQ ID NO: 11714 - protein, 9 aa, HUMAN IMMUNODEFICIENCY VIRUS
KLVSAGIRK

SEQ ID NO: 11715 - protein, 11 aa, HUMAN IMMUNODEFICIENCY VIRUS
ENLAFQQGEAR

SEQ ID NO: 11716 - protein, 8 aa, HUMAN IMMUNODEFICIENCY VIRUS
RANSPTSR

SEQ ID NO: 11717 - protein, 8 aa, HUMAN IMMUNODEFICIENCY VIRUS
KIEELRQH

SEQ ID NO: 11718 - protein, 8 aa, HUMAN IMMUNODEFICIENCY VIRUS
ELREHLLK

SEQ ID NO: 11719 - protein, 8 aa, HUMAN IMMUNODEFICIENCY VIRUS
WGKTPKFK

SEQ ID NO: 11720 - protein, 9 aa, HUMAN IMMUNODEFICIENCY VIRUS
TIKIGGQLK

SEQ ID NO: 11721 - protein, 10 aa, HUMAN IMMUNODEFICIENCY VIRUS
VTIKIGGQLK

SEQ ID NO: 11722 - protein, 10 aa, HUMAN IMMUNODEFICIENCY VIRUS
TVQPIQLPEK

SEQ ID NO: 11723 - protein, 10 aa, HUMAN IMMUNODEFICIENCY VIRUS
VIWGKTPKFK

SEQ ID NO: 11724 - protein, 11 aa, HUMAN IMMUNODEFICIENCY VIRUS
TLWQRPLVTIK

SEQ ID NO: 11725 - protein, 11 aa, HUMAN IMMUNODEFICIENCY VIRUS
WTVQPIQLPEK

SEQ ID NO: 11726 - protein, 11 aa, HUMAN IMMUNODEFICIENCY VIRUS
IVIWGKTPKFK

SEQ ID NO: 11727 - protein, 11 aa, HUMAN IMMUNODEFICIENCY VIRUS
YFSVPLDKDFR

SEQ ID NO: 11728 - protein, 11 aa, HUMAN IMMUNODEFICIENCY VIRUS
NLKTGKYAKMR

SEQ ID NO: 11729 - protein, 8 aa, HUMAN IMMUNODEFICIENCY VIRUS
PDIVIYQY

SEQ ID NO: 11730 - protein, 9 aa, HUMAN IMMUNODEFICIENCY VIRUS
SVPLDKDFR

SEQ ID NO: 11731 - protein, 10 aa, HUMAN IMMUNODEFICIENCY VIRUS
FSVPLDKDFR

SEQ ID NO: 11732 - protein, 10 aa, HUMAN IMMUNODEFICIENCY VIRUS
SVPLDKDFRK

SEQ ID NO: 11733 - protein, 10 aa, HUMAN IMMUNODEFICIENCY VIRUS
AGIKVKQLCK

SEQ ID NO: 11734 - protein, 10 aa, HUMAN IMMUNODEFICIENCY VIRUS
VNQIIEQLIK

SEQ ID NO: 11735 - protein, 11 aa, HUMAN IMMUNODEFICIENCY VIRUS
FSVPLDKDFRK

SEQ ID NO: 11736 - protein, 11 aa, HUMAN IMMUNODEFICIENCY VIRUS
SVPLDKDFRKY

SEQ ID NO: 11737 - protein, 11 aa, HUMAN IMMUNODEFICIENCY VIRUS
YAGIKVKQLCK

SEQ ID NO: 11738 - protein, 11 aa, HUMAN IMMUNODEFICIENCY VIRUS
LVSQIIEQLIK

SEQ ID NO: 11739 - protein, 11 aa, HUMAN IMMUNODEFICIENCY VIRUS
VNQIIEQLIKK

SEQ ID NO: 11740 - protein, 8 aa, HUMAN IMMUNODEFICIENCY VIRUS
PLDKDFRK

SEQ ID NO: 11741 - protein, 9 aa, HUMAN IMMUNODEFICIENCY VIRUS
PLDKDFRKY

SEQ ID NO: 11742 - protein, 9 aa, HUMAN IMMUNODEFICIENCY VIRUS
KTGKYAKMR

SEQ ID NO: 11743 - protein, 8 aa, HUMAN IMMUNODEFICIENCY VIRUS
LDKDFRKY

SEQ ID NO: 11744 - protein, 8 aa, HUMAN IMMUNODEFICIENCY VIRUS
KIEELREH

SEQ ID NO: 11745 - protein, 8 aa, HUMAN IMMUNODEFICIENCY VIRUS
TGKYAKMR

SEQ ID NO: 11746 - protein, 8 aa, HUMAN IMMUNODEFICIENCY VIRUS
GAHTNDVK

SEQ ID NO: 11747 - protein, 8 aa, HUMAN IMMUNODEFICIENCY VIRUS
LTDTTNQK

SEQ ID NO: 11748 - protein, 8 aa, HUMAN IMMUNODEFICIENCY VIRUS
PLWKGPAK

SEQ ID NO: 11749 - protein, 9 aa, HUMAN IMMUNODEFICIENCY VIRUS
GIKVRQLCK

SEQ ID NO: 11750 - protein, 9 aa, HUMAN IMMUNODEFICIENCY VIRUS
RGAHTNDVK

SEQ ID NO: 11751 - protein, 10 aa, HUMAN IMMUNODEFICIENCY VIRUS
KVRQLCKLLR

SEQ ID NO: 11752 - protein, 10 aa, HUMAN IMMUNODEFICIENCY VIRUS
ATESIVIWGK

SEQ ID NO: 11753 - protein, 10 aa, HUMAN IMMUNODEFICIENCY VIRUS
VSQIIEQLIK

SEQ ID NO: 11754 - protein, 10 aa, HUMAN IMMUNODEFICIENCY VIRUS
MAGDDCVASR

SEQ ID NO: 11755 - protein, 11 aa, HUMAN IMMUNODEFICIENCY VIRUS
VSQIIEQLIKK

SEQ ID NO: 11756 - protein, 11 aa, HUMAN IMMUNODEFICIENCY VIRUS
QMAGDDCVASR

SEQ ID NO: 11757 - protein, 9 aa, HUMAN IMMUNODEFICIENCY VIRUS
QIYAGIKVK

SEQ ID NO: 11758 - protein, 10 aa, HUMAN IMMUNODEFICIENCY VIRUS
KVYLAWVPAH

SEQ ID NO: 11759 - protein, 10 aa, HUMAN IMMUNODEFICIENCY VIRUS
KAACWWAGIK

SEQ ID NO: 11760 - protein, 11 aa, HUMAN IMMUNODEFICIENCY VIRUS
ASQIYAGIKVK

SEQ ID NO: 11761 - protein, 11 aa, HUMAN IMMUNODEFICIENCY VIRUS
KVYLAWVPAHK

SEQ ID NO: 11762 - protein, 8 aa, HUMAN IMMUNODEFICIENCY VIRUS
KFKLPIQK

SEQ ID NO: 11763 - protein, 8 aa, HUMAN IMMUNODEFICIENCY VIRUS
GDDCVASR

SEQ ID NO: 11764 - protein, 9 aa, HUMAN IMMUNODEFICIENCY VIRUS
AGDDCVASR

SEQ ID NO: 11765 - protein, 10 aa, HUMAN IMMUNODEFICIENCY VIRUS
VSLTETTNQK

SEQ ID NO: 11766 - protein, 11 aa, HUMAN IMMUNODEFICIENCY VIRUS
LLKLAGRWPVK

SEQ ID NO: 11767 - protein, 8 aa, HUMAN IMMUNODEFICIENCY VIRUS
YFSVPLDK

SEQ ID NO: 11768 - protein, 8 aa, HUMAN IMMUNODEFICIENCY VIRUS
ACWWAGIK

SEQ ID NO: 11769 - protein, 9 aa, HUMAN IMMUNODEFICIENCY VIRUS
SLTETTNQK

SEQ ID NO: 11770 - protein, 9 aa, HUMAN IMMUNODEFICIENCY VIRUS
AACWWAGIK

SEQ ID NO: 11771 - protein, 10 aa, HUMAN IMMUNODEFICIENCY VIRUS
DAYFSVPLDK

SEQ ID NO: 11772 - protein, 10 aa, HUMAN IMMUNODEFICIENCY VIRUS
DLEIGQHRTK

SEQ ID NO: 11773 - protein, 10 aa, HUMAN IMMUNODEFICIENCY VIRUS
QLCKLLRGTK

SEQ ID NO: 11774 - protein, 11 aa, HUMAN IMMUNODEFICIENCY VIRUS
IFAIKKKDSTK

SEQ ID NO: 11775 - protein, 11 aa, HUMAN IMMUNODEFICIENCY VIRUS
GDAYFSVPLDK

SEQ ID NO: 11776 - protein, 11 aa, HUMAN IMMUNODEFICIENCY VIRUS
SDLEIGQHRTK

SEQ ID NO: 11777 - protein, 11 aa, HUMAN IMMUNODEFICIENCY VIRUS
SDFNLPPIVAK

SEQ ID NO: 11778 - protein, 11 aa, HUMAN IMMUNODEFICIENCY VIRUS
AGIKQEFGIPY

SEQ ID NO: 11779 - protein, 8 aa, HUMAN IMMUNODEFICIENCY VIRUS
EIGQHRTK

SEQ ID NO: 11780 - protein, 8 aa, HUMAN IMMUNODEFICIENCY VIRUS
RTKIEELR

SEQ ID NO: 11781 - protein, 8 aa, HUMAN IMMUNODEFICIENCY VIRUS
YLAWVPAH

SEQ ID NO: 11782 - protein, 8 aa, HUMAN IMMUNODEFICIENCY VIRUS
LAWVPAHK

SEQ ID NO: 11783 - protein, 9 aa, HUMAN IMMUNODEFICIENCY VIRUS
YLAWVPAHK

SEQ ID NO: 11784 - protein, 10 aa, HUMAN IMMUNODEFICIENCY VIRUS
NFPQITLWQR

SEQ ID NO: 11785 - protein, 10 aa, HUMAN IMMUNODEFICIENCY VIRUS
MTKILEPFRK

SEQ ID NO: 11786 - protein, 10 aa, HUMAN IMMUNODEFICIENCY VIRUS
AGRWPVKVIH

SEQ ID NO: 11787 - protein, 10 aa, HUMAN IMMUNODEFICIENCY VIRUS
GIKQEFGIPY

SEQ ID NO: 11788 - protein, 11 aa, HUMAN IMMUNODEFICIENCY VIRUS
SMTKILEPFRK

SEQ ID NO: 11789 - protein, 11 aa, HUMAN IMMUNODEFICIENCY VIRUS
KTPKFRLPIQK

SEQ ID NO: 11790 - protein, 11 aa, HUMAN IMMUNODEFICIENCY VIRUS
LAGRWPVKVIH

SEQ ID NO: 11791 - protein, 10 aa, HUMAN IMMUNODEFICIENCY VIRUS
KVYLSWVPAH

SEQ ID NO: 11792 - protein, 11 aa, HUMAN IMMUNODEFICIENCY VIRUS
KVYLSWVPAHK

SEQ ID NO: 11793 - protein, 8 aa, HUMAN IMMUNODEFICIENCY VIRUS
KILEPFRK

SEQ ID NO: 11794 - protein, 8 aa, HUMAN IMMUNODEFICIENCY VIRUS
KVILVAVH

SEQ ID NO: 11795 - protein, 10 aa, HUMAN IMMUNODEFICIENCY VIRUS
SFPQITLWQR

SEQ ID NO: 11796 - protein, 10 aa, HUMAN IMMUNODEFICIENCY VIRUS
DFNLPPIVAK

SEQ ID NO: 11797 - protein, 10 aa, HUMAN IMMUNODEFICIENCY VIRUS
EGKVILVAVH

SEQ ID NO: 11798 - protein, 11 aa, HUMAN IMMUNODEFICIENCY VIRUS
LLKWGFTTPDK

SEQ ID NO: 11799 - protein, 11 aa, HUMAN IMMUNODEFICIENCY VIRUS
LLRWGFTTPDK

SEQ ID NO: 11800 - protein, 11 aa, HUMAN IMMUNODEFICIENCY VIRUS
IDIIATDIQTK

SEQ ID NO: 11801 - protein, 8 aa, HUMAN IMMUNODEFICIENCY VIRUS
NTPIFAIK

SEQ ID NO: 11802 - protein, 8 aa, HUMAN IMMUNODEFICIENCY VIRUS
GDDCVAGR

SEQ ID NO: 11803 - protein, 9 aa, HUMAN IMMUNODEFICIENCY VIRUS
YNTPIFAIK

SEQ ID NO: 11804 - protein, 9 aa, HUMAN IMMUNODEFICIENCY VIRUS
NTPIFAIKK

SEQ ID NO: 11805 - protein, 9 aa, HUMAN IMMUNODEFICIENCY VIRUS
LCKLLRGTK

SEQ ID NO: 11806 - protein, 9 aa, HUMAN IMMUNODEFICIENCY VIRUS
AGDDCVAGR

SEQ ID NO: 11807 - protein, 10 aa, HUMAN IMMUNODEFICIENCY VIRUS
YNTPIFAIKK

SEQ ID NO: 11808 - protein, 10 aa, HUMAN IMMUNODEFICIENCY VIRUS
NTPIFAIKKK

SEQ ID NO: 11809 - protein, 10 aa, HUMAN IMMUNODEFICIENCY VIRUS
MAGDDCVAGR

SEQ ID NO: 11810 - protein, 11 aa, HUMAN IMMUNODEFICIENCY VIRUS
YNTPIFAIKKK

SEQ ID NO: 11811 - protein, 11 aa, HUMAN IMMUNODEFICIENCY VIRUS
QGQGQWTYQIY

SEQ ID NO: 11812 - protein, 11 aa, HUMAN IMMUNODEFICIENCY VIRUS
KLGKAGYVTDR

SEQ ID NO: 11813 - protein, 11 aa, HUMAN IMMUNODEFICIENCY VIRUS
TAYFLLKLAGR

SEQ ID NO: 11814 - protein, 11 aa, HUMAN IMMUNODEFICIENCY VIRUS
QMAGDDCVAGR

SEQ ID NO: 11815 - protein, 9 aa, HUMAN IMMUNODEFICIENCY VIRUS
QGQWTYQIY

SEQ ID NO: 11816 - protein, 8 aa, HUMAN IMMUNODEFICIENCY VIRUS
PIFAIKKK

SEQ ID NO: 11817 - protein, 8 aa, HUMAN IMMUNODEFICIENCY VIRUS
QGQGQWTY

SEQ ID NO: 11818 - protein, 8 aa, HUMAN IMMUNODEFICIENCY VIRUS
FLLKLAGR

SEQ ID NO: 11819 - protein, 9 aa, HUMAN IMMUNODEFICIENCY VIRUS
YFLLKLAGR

SEQ ID NO: 11820 - protein, 10 aa, HUMAN IMMUNODEFICIENCY VIRUS
QLCKLLRGAK

SEQ ID NO: 11821 - protein, 10 aa, HUMAN IMMUNODEFICIENCY VIRUS
LGKAGYVTDR

SEQ ID NO: 11822 - protein, 10 aa, HUMAN IMMUNODEFICIENCY VIRUS
IDKAQEEHEK

SEQ ID NO: 11823 - protein, 11 aa, HUMAN IMMUNODEFICIENCY VIRUS
PSKDLIAEIQK

SEQ ID NO: 11824 - protein, 11 aa, HUMAN IMMUNODEFICIENCY VIRUS
GIDKAQEEHEK

SEQ ID NO: 11825 - protein, 11 aa, HUMAN IMMUNODEFICIENCY VIRUS
IDKAQEEHEKY

SEQ ID NO: 11826 - protein, 11 aa, HUMAN IMMUNODEFICIENCY VIRUS
SDFNLPPVVAK

SEQ ID NO: 11827 - protein, 8 aa, HUMAN IMMUNODEFICIENCY VIRUS
RAKIEELR

SEQ ID NO: 11828 - protein, 8 aa, HUMAN IMMUNODEFICIENCY VIRUS
KFRLPIQK

SEQ ID NO: 11829 - protein, 8 aa, HUMAN IMMUNODEFICIENCY VIRUS
NLPPIVAK

SEQ ID NO: 11830 - protein, 9 aa, HUMAN IMMUNODEFICIENCY VIRUS
LCKLLRGAK

SEQ ID NO: 11831 - protein, 9 aa, HUMAN IMMUNODEFICIENCY VIRUS
FNLPPIVAK

SEQ ID NO: 11832 - protein, 9 aa, HUMAN IMMUNODEFICIENCY VIRUS
SNFTSAAVK

SEQ ID NO: 11833 - protein, 10 aa, HUMAN IMMUNODEFICIENCY VIRUS
DFNLPPVVAK

SEQ ID NO: 11834 - protein, 10 aa, HUMAN IMMUNODEFICIENCY VIRUS
GSNFTSAAVK

SEQ ID NO: 11835 - protein, 11 aa, HUMAN IMMUNODEFICIENCY VIRUS
TGQETAYFLLK

SEQ ID NO: 11836 - protein, 11 aa, HUMAN IMMUNODEFICIENCY VIRUS
NGSNFTSAAVK

SEQ ID NO: 11837 - protein, 8 aa, HUMAN IMMUNODEFICIENCY VIRUS
KAQEEHEK

SEQ ID NO: 11838 - protein, 9 aa, HUMAN IMMUNODEFICIENCY VIRUS
ASQIYAGIK

SEQ ID NO: 11839 - protein, 9 aa, HUMAN IMMUNODEFICIENCY VIRUS
KAQEEHEKY

SEQ ID NO: 11840 - protein, 10 aa, HUMAN IMMUNODEFICIENCY VIRUS
KAQEEHEKYH

SEQ ID NO: 11841 - protein, 8 aa, HUMAN IMMUNODEFICIENCY VIRUS
INLPGKWK

SEQ ID NO: 11842 - protein, 8 aa, HUMAN IMMUNODEFICIENCY VIRUS
EICTEMEK

SEQ ID NO: 11843 - protein, 8 aa, HUMAN IMMUNODEFICIENCY VIRUS
EIGQHRAK

SEQ ID NO: 11844 - protein, 8 aa, HUMAN IMMUNODEFICIENCY VIRUS
LVSSGIRK

SEQ ID NO: 11845 - protein, 8 aa, HUMAN IMMUNODEFICIENCY VIRUS
NLPPVVAK

SEQ ID NO: 11846 - protein, 8 aa, HUMAN IMMUNODEFICIENCY VIRUS
ETAYFLLK

SEQ ID NO: 11847 - protein, 9 aa, HUMAN IMMUNODEFICIENCY VIRUS
KLVSSGIRK

SEQ ID NO: 11848 - protein, 9 aa, HUMAN IMMUNODEFICIENCY VIRUS
FNLPPVVAK

SEQ ID NO: 11849 - protein, 10 aa, HUMAN IMMUNODEFICIENCY VIRUS
INLPGKWKPK

SEQ ID NO: 11850 - protein, 10 aa, HUMAN IMMUNODEFICIENCY VIRUS
DLEIGQHRAK

SEQ ID NO: 11851 - protein, 10 aa, HUMAN IMMUNODEFICIENCY VIRUS
WASQIYAGIK

SEQ ID NO: 11852 - protein, 10 aa, HUMAN IMMUNODEFICIENCY VIRUS
KVKQLCKLLR

SEQ ID NO: 11853 - protein, 11 aa, HUMAN IMMUNODEFICIENCY VIRUS
EICTEMEKEGK

SEQ ID NO: 11854 - protein, 11 aa, HUMAN IMMUNODEFICIENCY VIRUS
SDLEIGQHRAK

SEQ ID NO: 11855 - protein, 11 aa, HUMAN IMMUNODEFICIENCY VIRUS
VDKLVSSGIRK

SEQ ID NO: 11856 - protein, 9 aa, HUMAN IMMUNODEFICIENCY VIRUS
ASQIYPGIK

SEQ ID NO: 11857 - protein, 9 aa, HUMAN IMMUNODEFICIENCY VIRUS
KDLIAEIQK

SEQ ID NO: 11858 - protein, 9 aa, HUMAN IMMUNODEFICIENCY VIRUS
NLKTGKYAK

SEQ ID NO: 11859 - protein, 8 aa, HUMAN IMMUNODEFICIENCY VIRUS
DLIAEIQK

SEQ ID NO: 11860 - protein, 8 aa, HUMAN IMMUNODEFICIENCY VIRUS
IVGAETFY

SEQ ID NO: 11861 - protein, 8 aa, HUMAN IMMUNODEFICIENCY VIRUS
NFTSAAVK

SEQ ID NO: 11862 - protein, 9 aa, HUMAN IMMUNODEFICIENCY VIRUS
CTEMEKEGK

SEQ ID NO: 11863 - protein, 9 aa, HUMAN IMMUNODEFICIENCY VIRUS
GIKVKQLCK

SEQ ID NO: 11864 - protein, 9 aa, HUMAN IMMUNODEFICIENCY VIRUS
PIVGAETFY

SEQ ID NO: 11865 - protein, 9 aa, HUMAN IMMUNODEFICIENCY VIRUS
QLIKKEKVY

SEQ ID NO: 11866 - protein, 10 aa, HUMAN IMMUNODEFICIENCY VIRUS
ICTEMEKEGK

SEQ ID NO: 11867 - protein, 10 aa, HUMAN IMMUNODEFICIENCY VIRUS
WASQIYPGIK

SEQ ID NO: 11868 - protein, 10 aa, HUMAN IMMUNODEFICIENCY VIRUS
KNLKTGKYAK

SEQ ID NO: 11869 - protein, 9 aa, HUMAN IMMUNODEFICIENCY VIRUS
NLKTGKYAR

SEQ ID NO: 11870 - protein, 8 aa, HUMAN IMMUNODEFICIENCY VIRUS
KLVSSGIR

SEQ ID NO: 11871 - protein, 10 aa, HUMAN IMMUNODEFICIENCY VIRUS
KNLKTGKYAR

SEQ ID NO: 11872 - protein, 10 aa, HUMAN IMMUNODEFICIENCY VIRUS
VIWGKTPKFR

SEQ ID NO: 11873 - protein, 10 aa, HUMAN IMMUNODEFICIENCY VIRUS
VDKLVSSGIR

SEQ ID NO: 11874 - protein, 11 aa, HUMAN IMMUNODEFICIENCY VIRUS
IVIWGKTPKFR

SEQ ID NO: 11875 - protein, 11 aa, HUMAN IMMUNODEFICIENCY VIRUS
QVDKLVSSGIR

SEQ ID NO: 11876 - protein, 8 aa, HUMAN IMMUNODEFICIENCY VIRUS
WGKTPKFR

SEQ ID NO: 11877 - protein, 8 aa, HUMAN IMMUNODEFICIENCY VIRUS
LTETTNQK

SEQ ID NO: 11878 - protein, 9 aa, HUMAN IMMUNODEFICIENCY VIRUS
ANRETKLGK

SEQ ID NO: 11879 - protein, 10 aa, HUMAN IMMUNODEFICIENCY VIRUS
AANRETKLGK

SEQ ID NO: 11880 - protein, 10 aa, HUMAN IMMUNODEFICIENCY VIRUS
IIEQLIKKEK

SEQ ID NO: 11881 - protein, 11 aa, HUMAN IMMUNODEFICIENCY VIRUS
GAANRETKLGK

SEQ ID NO: 11882 - protein, 11 aa, HUMAN IMMUNODEFICIENCY VIRUS
QIIEQLIKKEK

SEQ ID NO: 11883 - protein, 11 aa, HUMAN IMMUNODEFICIENCY VIRUS
ILKLAGRWPVK

SEQ ID NO: 11884 - protein, 8 aa, HUMAN IMMUNODEFICIENCY VIRUS
KIILVAVH

SEQ ID NO: 11885 - protein, 8 aa, HUMAN IMMUNODEFICIENCY VIRUS
ETAYFILK

SEQ ID NO: 11886 - protein, 9 aa, HUMAN IMMUNODEFICIENCY VIRUS
YFILKLAGR

SEQ ID NO: 11887 - protein, 10 aa, HUMAN IMMUNODEFICIENCY VIRUS
EGKIILVAVH

SEQ ID NO: 11888 - protein, 11 aa, HUMAN IMMUNODEFICIENCY VIRUS
PSINNETPGIR

SEQ ID NO: 11889 - protein, 11 aa, HUMAN IMMUNODEFICIENCY VIRUS
TGQETAYFILK

SEQ ID NO: 11890 - protein, 11 aa, HUMAN IMMUNODEFICIENCY VIRUS
TAYFILKLAGR

SEQ ID NO: 11891 - protein, 9 aa, HUMAN IMMUNODEFICIENCY VIRUS
INNETPGIR

SEQ ID NO: 11892 - protein, 10 aa, HUMAN IMMUNODEFICIENCY VIRUS
INNETPGIRY

SEQ ID NO: 11893 - protein, 8 aa, HUMAN IMMUNODEFICIENCY VIRUS
FILKLAGR

SEQ ID NO: 11894 - protein, 10 aa, HUMAN IMMUNODEFICIENCY VIRUS
SINNETPGIR

SEQ ID NO: 11895 - protein, 11 aa, HUMAN IMMUNODEFICIENCY VIRUS
SINNETPGIRY

SEQ ID NO: 11896 - protein, 11 aa, HUMAN IMMUNODEFICIENCY VIRUS
SSMTKILEPFR

SEQ ID NO: 11897 - protein, 11 aa, HUMAN IMMUNODEFICIENCY VIRUS
QTKELQKQITK

SEQ ID NO: 11898 - protein, 10 aa, HUMAN IMMUNODEFICIENCY VIRUS
EMEKEGKISK

SEQ ID NO: 11899 - protein, 11 aa, HUMAN IMMUNODEFICIENCY VIRUS
DVKQLTEAVQK

SEQ ID NO: 11900 - protein, 10 aa, HUMAN IMMUNODEFICIENCY VIRUS
DIIATDIQTK

SEQ ID NO: 11901 - protein, 8 aa, HUMAN IMMUNODEFICIENCY VIRUS
ELQKQITK

SEQ ID NO: 11902 - protein, 8 aa, HUMAN IMMUNODEFICIENCY VIRUS
LIKKEKVY

SEQ ID NO: 11903 - protein, 8 aa, HUMAN IMMUNODEFICIENCY VIRUS
DSRDPIWK

SEQ ID NO: 11904 - protein, 9 aa, HUMAN IMMUNODEFICIENCY VIRUS
ETKLGKAGY

SEQ ID NO: 11905 - protein, 9 aa, HUMAN IMMUNODEFICIENCY VIRUS
IIATDIQTK

SEQ ID NO: 11906 - protein, 9 aa, HUMAN IMMUNODEFICIENCY VIRUS
QITKIQNFR

SEQ ID NO: 11907 - protein, 9 aa, HUMAN IMMUNODEFICIENCY VIRUS
RDSRDPIWK

SEQ ID NO: 11908 - protein, 10 aa, HUMAN IMMUNODEFICIENCY VIRUS
TDIQTKELQK

SEQ ID NO: 11909 - protein, 10 aa, HUMAN IMMUNODEFICIENCY VIRUS
RDPIWKGPAK

SEQ ID NO: 11910 - protein, 11 aa, HUMAN IMMUNODEFICIENCY VIRUS
ATDIQTKELQK

SEQ ID NO: 11911 - protein, 11 aa, HUMAN IMMUNODEFICIENCY VIRUS
QITKIQNFRVY

SEQ ID NO: 11912 - protein, 8 aa, HUMAN IMMUNODEFICIENCY VIRUS
ITKIQNFR

SEQ ID NO: 11913 - protein, 10 aa, HUMAN IMMUNODEFICIENCY VIRUS
ITKIQNFRVY

SEQ ID NO: 11914 - protein, 11 aa, HUMAN IMMUNODEFICIENCY VIRUS
ITKIQNFRVYY

SEQ ID NO: 11915 - protein, 8 aa, HUMAN IMMUNODEFICIENCY VIRUS
IATDIQTK

SEQ ID NO: 11916 - protein, 8 aa, HUMAN IMMUNODEFICIENCY VIRUS
PIWKGPAK

SEQ ID NO: 11917 - protein, 9 aa, HUMAN IMMUNODEFICIENCY VIRUS
NLPGKWKPK

SEQ ID NO: 11918 - protein, 9 aa, HUMAN IMMUNODEFICIENCY VIRUS
AIFQSSMTK

SEQ ID NO: 11919 - protein, 10 aa, HUMAN IMMUNODEFICIENCY VIRUS
PAIFQSSMTK

SEQ ID NO: 11920 - protein, 11 aa, HUMAN IMMUNODEFICIENCY VIRUS
VFAIKKKDSTK

SEQ ID NO: 11921 - protein, 8 aa, HUMAN IMMUNODEFICIENCY VIRUS
NTPVFAIK

SEQ ID NO: 11922 - protein, 8 aa, HUMAN IMMUNODEFICIENCY VIRUS
PVFAIKKK

SEQ ID NO: 11923 - protein, 8 aa, HUMAN IMMUNODEFICIENCY VIRUS
QLTEAVQK

SEQ ID NO: 11924 - protein, 8 aa, HUMAN IMMUNODEFICIENCY VIRUS
QIIEQLIK

SEQ ID NO: 11925 - protein, 8 aa, HUMAN IMMUNODEFICIENCY VIRUS
IIEQLIKK

SEQ ID NO: 11926 - protein, 8 aa, HUMAN IMMUNODEFICIENCY VIRUS
YLSWVPAH

SEQ ID NO: 11927 - protein, 8 aa, HUMAN IMMUNODEFICIENCY VIRUS
LSWVPAHK

SEQ ID NO: 11928 - protein, 9 aa, HUMAN IMMUNODEFICIENCY VIRUS
YNTPVFAIK

SEQ ID NO: 11929 - protein, 9 aa, HUMAN IMMUNODEFICIENCY VIRUS
NTPVFAIKK

SEQ ID NO: 11930 - protein, 9 aa, HUMAN IMMUNODEFICIENCY VIRUS
QIIEQLIKK

SEQ ID NO: 11931 - protein, 9 aa, HUMAN IMMUNODEFICIENCY VIRUS
YLSWVPAHK

SEQ ID NO: 11932 - protein, 9 aa, HUMAN IMMUNODEFICIENCY VIRUS
VIQDNSDIK

SEQ ID NO: 11933 - protein, 10 aa, HUMAN IMMUNODEFICIENCY VIRUS
YNTPVFAIKK

SEQ ID NO: 11934 - protein, 10 aa, HUMAN IMMUNODEFICIENCY VIRUS
NTPVFAIKKK

SEQ ID NO: 11935 - protein, 10 aa, HUMAN IMMUNODEFICIENCY VIRUS
VVIQDNSDIK

SEQ ID NO: 11936 - protein, 11 aa, HUMAN IMMUNODEFICIENCY VIRUS
YNTPVFAIKKK

SEQ ID NO: 11937 - protein, 11 aa, HUMAN IMMUNODEFICIENCY VIRUS
AVVIQDNSDIK

SEQ ID NO: 11938 - protein, 8 aa, HUMAN IMMUNODEFICIENCY VIRUS
IFQSSMTK

SEQ ID NO: 11939 - protein, 11 aa, HUMAN IMMUNODEFICIENCY VIRUS
ILKEPVHGVYY

SEQ ID NO: 11940 - protein, 11 aa, HUMAN IMMUNODEFICIENCY VIRUS
LDGIDKAQEEH

SEQ ID NO: 11941 - protein, 9 aa, HUMAN IMMUNODEFICIENCY VIRUS
AGYVTDRGR

SEQ ID NO: 11942 - protein, 9 aa, HUMAN IMMUNODEFICIENCY VIRUS
YVTDRGRQK

SEQ ID NO: 11943 - protein, 10 aa, HUMAN IMMUNODEFICIENCY VIRUS
KAGYVTDRGR

SEQ ID NO: 11944 - protein, 10 aa, HUMAN IMMUNODEFICIENCY VIRUS
LGIIQAQPDK

SEQ ID NO: 11945 - protein, 10 aa, HUMAN IMMUNODEFICIENCY VIRUS
DGIDKAQEEH

SEQ ID NO: 11946 - protein, 11 aa, HUMAN IMMUNODEFICIENCY VIRUS
PVHGVYYDPSK

SEQ ID NO: 11947 - protein, 11 aa, HUMAN IMMUNODEFICIENCY VIRUS
AGYVTDRGRQK

SEQ ID NO: 11948 - protein, 11 aa, HUMAN IMMUNODEFICIENCY VIRUS
ALGIIQAQPDK

SEQ ID NO: 11949 - protein, 11 aa, HUMAN IMMUNODEFICIENCY VIRUS
DIKVVPRRKAK

SEQ ID NO: 11950 - protein, 8 aa, HUMAN IMMUNODEFICIENCY VIRUS
VTDRGRQK

SEQ ID NO: 11951 - protein, 8 aa, HUMAN IMMUNODEFICIENCY VIRUS
IIQAQPDK

SEQ ID NO: 11952 - protein, 9 aa, HUMAN IMMUNODEFICIENCY VIRUS
GIIQAQPDK

SEQ ID NO: 11953 - protein, 9 aa, HUMAN IMMUNODEFICIENCY VIRUS
GIDKAQEEH

SEQ ID NO: 11954 - protein, 9 aa, HUMAN IMMUNODEFICIENCY VIRUS
NSDIKVVPR

SEQ ID NO: 11955 - protein, 10 aa, HUMAN IMMUNODEFICIENCY VIRUS
ILKEPVHGVY

SEQ ID NO: 11956 - protein, 10 aa, HUMAN IMMUNODEFICIENCY VIRUS
DNSDIKVVPR

SEQ ID NO: 11957 - protein, 10 aa, HUMAN IMMUNODEFICIENCY VIRUS
NSDIKVVPRR

SEQ ID NO: 11958 - protein, 11 aa, HUMAN IMMUNODEFICIENCY VIRUS
EILKEPVHGVY

SEQ ID NO: 11959 - protein, 11 aa, HUMAN IMMUNODEFICIENCY VIRUS
WTYQIYQEPFK

SEQ ID NO: 11960 - protein, 11 aa, HUMAN IMMUNODEFICIENCY VIRUS
QIYQEPFKNLK

SEQ ID NO: 11961 - protein, 11 aa, HUMAN IMMUNODEFICIENCY VIRUS
QDNSDIKVVPR

SEQ ID NO: 11962 - protein, 11 aa, HUMAN IMMUNODEFICIENCY VIRUS
DNSDIKVVPRR

SEQ ID NO: 11963 - protein, 11 aa, HUMAN IMMUNODEFICIENCY VIRUS
NSDIKVVPRRK

SEQ ID NO: 11964 - protein, 11 aa, HUMAN IMMUNODEFICIENCY VIRUS
ESIVIWGKTPK

SEQ ID NO: 11965 - protein, 8 aa, HUMAN IMMUNODEFICIENCY VIRUS
QIYQEPFK

SEQ ID NO: 11966 - protein, 8 aa, HUMAN IMMUNODEFICIENCY VIRUS
IDKAQEEH

SEQ ID NO: 11967 - protein, 8 aa, HUMAN IMMUNODEFICIENCY VIRUS
KAKIIRDY

SEQ ID NO: 11968 - protein, 10 aa, HUMAN IMMUNODEFICIENCY VIRUS
KAKIIRDYGK

SEQ ID NO: 11969 - protein, 11 aa, HUMAN IMMUNODEFICIENCY VIRUS
KISKIGPENPY

SEQ ID NO: 11970 - protein, 8 aa, HUMAN IMMUNODEFICIENCY VIRUS
KAGYVTDR

SEQ ID NO: 11971 - protein, 10 aa, HUMAN IMMUNODEFICIENCY VIRUS
ISKIGPENPY

SEQ ID NO: 11972 - protein, 10 aa, HUMAN IMMUNODEFICIENCY VIRUS
SMTKILEPFR

SEQ ID NO: 11973 - protein, 10 aa, HUMAN IMMUNODEFICIENCY VIRUS
SIVIWGKTPK

SEQ ID NO: 11974 - protein, 11 aa, HUMAN IMMUNODEFICIENCY VIRUS
IVIYQYMDDLY

SEQ ID NO: 11975 - protein, 11 aa, HUMAN IMMUNODEFICIENCY VIRUS
VVPRRKAKIIR

SEQ ID NO: 11976 - protein, 8 aa, HUMAN IMMUNODEFICIENCY VIRUS
GVYYDPSK

SEQ ID NO: 11977 - protein, 8 aa, HUMAN IMMUNODEFICIENCY VIRUS
SCDKCQLK

SEQ ID NO: 11978 - protein, 9 aa, HUMAN IMMUNODEFICIENCY VIRUS
MTKILEPFR

SEQ ID NO: 11979 - protein, 9 aa, HUMAN IMMUNODEFICIENCY VIRUS
HGVYYDPSK

SEQ ID NO: 11980 - protein, 9 aa, HUMAN IMMUNODEFICIENCY VIRUS
ASCDKCQLK

SEQ ID NO: 11981 - protein, 10 aa, HUMAN IMMUNODEFICIENCY VIRUS
DSWTVNDIQK

SEQ ID NO: 11982 - protein, 10 aa, HUMAN IMMUNODEFICIENCY VIRUS
TFYVDGAANR

SEQ ID NO: 11983 - protein, 10 aa, HUMAN IMMUNODEFICIENCY VIRUS
VASCDKCQLK

SEQ ID NO: 11984 - protein, 11 aa, HUMAN IMMUNODEFICIENCY VIRUS
KDSWTVNDIQK

SEQ ID NO: 11985 - protein, 11 aa, HUMAN IMMUNODEFICIENCY VIRUS
ETFYVDGAANR

SEQ ID NO: 11986 - protein, 11 aa, HUMAN IMMUNODEFICIENCY VIRUS
IVASCDKCQLK

SEQ ID NO: 11987 - protein, 8 aa, HUMAN IMMUNODEFICIENCY VIRUS
SDIKVVPR

SEQ ID NO: 11988 - protein, 9 aa, HUMAN IMMUNODEFICIENCY VIRUS
SDIKVVPRR

SEQ ID NO: 11989 - protein, 10 aa, HUMAN IMMUNODEFICIENCY VIRUS
VDGAANRETK

SEQ ID NO: 11990 - protein, 10 aa, HUMAN IMMUNODEFICIENCY VIRUS
IGQVRDQAEH

SEQ ID NO: 11991 - protein, 10 aa, HUMAN IMMUNODEFICIENCY VIRUS
QVRDQAEHLK

SEQ ID NO: 11992 - protein, 10 aa, HUMAN IMMUNODEFICIENCY VIRUS
SDIKVVPRRK

SEQ ID NO: 11993 - protein, 11 aa, HUMAN IMMUNODEFICIENCY VIRUS
ENREILKEPVH

SEQ ID NO: 11994 - protein, 11 aa, HUMAN IMMUNODEFICIENCY VIRUS
YVDGAANRETK

SEQ ID NO: 11995 - protein, 11 aa, HUMAN IMMUNODEFICIENCY VIRUS
IIGQVRDQAEH

SEQ ID NO: 11996 - protein, 11 aa, HUMAN IMMUNODEFICIENCY VIRUS
VAKEIVASCDK

SEQ ID NO: 11997 - protein, 8 aa, HUMAN IMMUNODEFICIENCY VIRUS
GAANRETK

SEQ ID NO: 11998 - protein, 8 aa, HUMAN IMMUNODEFICIENCY VIRUS
EIVASCDK

SEQ ID NO: 11999 - protein, 9 aa, HUMAN IMMUNODEFICIENCY VIRUS
DGAANRETK

SEQ ID NO: 12000 - protein, 10 aa, HUMAN IMMUNODEFICIENCY VIRUS
PFKNLKTGKY

SEQ ID NO: 12001 - protein, 11 aa, HUMAN IMMUNODEFICIENCY VIRUS
PLVKLWYQLEK

SEQ ID NO: 12002 - protein, 8 aa, HUMAN IMMUNODEFICIENCY VIRUS
EILKEPVH

SEQ ID NO: 12003 - protein, 8 aa, HUMAN IMMUNODEFICIENCY VIRUS
KLWYQLEK

SEQ ID NO: 12004 - protein, 8 aa, HUMAN IMMUNODEFICIENCY VIRUS
RDQAEHLK

SEQ ID NO: 12005 - protein, 9 aa, HUMAN IMMUNODEFICIENCY VIRUS
PFKNLKTGK

SEQ ID NO: 12006 - protein, 9 aa, HUMAN IMMUNODEFICIENCY VIRUS
DIQTKELQK

SEQ ID NO: 12007 - protein, 10 aa, HUMAN IMMUNODEFICIENCY VIRUS
LVKLWYQLEK

SEQ ID NO: 12008 - protein, 11 aa, HUMAN IMMUNODEFICIENCY VIRUS
KVKQWPLTEEK

SEQ ID NO: 12009 - protein, 8 aa, HUMAN IMMUNODEFICIENCY VIRUS
VIWGKTPK

SEQ ID NO: 12010 - protein, 8 aa, HUMAN IMMUNODEFICIENCY VIRUS
QVRDQAEH

SEQ ID NO: 12011 - protein, 8 aa, HUMAN IMMUNODEFICIENCY VIRUS
DIKVVPRR

SEQ ID NO: 12012 - protein, 9 aa, HUMAN IMMUNODEFICIENCY VIRUS
IVIWGKTPK

SEQ ID NO: 12013 - protein, 9 aa, HUMAN IMMUNODEFICIENCY VIRUS
DIKVVPRRK

SEQ ID NO: 12014 - protein, 10 aa, HUMAN IMMUNODEFICIENCY VIRUS
KVLFLDGIDK

SEQ ID NO: 12015 - protein, 10 aa, HUMAN IMMUNODEFICIENCY VIRUS
KCQLKGEAMH

SEQ ID NO: 12016 - protein, 10 aa, HUMAN IMMUNODEFICIENCY VIRUS
VVESMNKELK

SEQ ID NO: 12017 - protein, 11 aa, HUMAN IMMUNODEFICIENCY VIRUS
GVVESMNKELK

SEQ ID NO: 12018 - protein, 11 aa, HUMAN IMMUNODEFICIENCY VIRUS
VVESMNKELKK

SEQ ID NO: 12019 - protein, 8 aa, HUMAN IMMUNODEFICIENCY VIRUS
GVVESMNK

SEQ ID NO: 12020 - protein, 9 aa, HUMAN IMMUNODEFICIENCY VIRUS
QGVVESMNK

SEQ ID NO: 12021 - protein, 10 aa, HUMAN IMMUNODEFICIENCY VIRUS
KLKPGMDGPK

SEQ ID NO: 12022 - protein, 11 aa, HUMAN IMMUNODEFICIENCY VIRUS
QSQGVVESMNK

SEQ ID NO: 12023 - protein, 8 aa, HUMAN IMMUNODEFICIENCY VIRUS
ESIVIWGK

SEQ ID NO: 12024 - protein, 8 aa, HUMAN IMMUNODEFICIENCY VIRUS
YVDGAANR

SEQ ID NO: 12025 - protein, 8 aa, HUMAN IMMUNODEFICIENCY VIRUS
LAGRWPVK

SEQ ID NO: 12026 - protein, 8 aa, HUMAN IMMUNODEFICIENCY VIRUS
KIIRDYGK

SEQ ID NO: 12027 - protein, 9 aa, HUMAN IMMUNODEFICIENCY VIRUS
KLAGRWPVK

SEQ ID NO: 12028 - protein, 11 aa, HUMAN IMMUNODEFICIENCY VIRUS
QNFRVYYRDSR

SEQ ID NO: 12029 - protein, 8 aa, HUMAN IMMUNODEFICIENCY VIRUS
GMDGPKVK

SEQ ID NO: 12030 - protein, 8 aa, HUMAN IMMUNODEFICIENCY VIRUS
KIGPENPY

SEQ ID NO: 12031 - protein, 8 aa, HUMAN IMMUNODEFICIENCY VIRUS
NNETPGIR

SEQ ID NO: 12032 - protein, 8 aa, HUMAN IMMUNODEFICIENCY VIRUS
FTTPDKKH

SEQ ID NO: 12033 - protein, 9 aa, HUMAN IMMUNODEFICIENCY VIRUS
PGMDGPKVK

SEQ ID NO: 12034 - protein, 9 aa, HUMAN IMMUNODEFICIENCY VIRUS
NNETPGIRY

SEQ ID NO: 12035 - protein, 9 aa, HUMAN IMMUNODEFICIENCY VIRUS
GFTTPDKKH

SEQ ID NO: 12036 - protein, 9 aa, HUMAN IMMUNODEFICIENCY VIRUS
VLFLDGIDK

SEQ ID NO: 12037 - protein, 10 aa, HUMAN IMMUNODEFICIENCY VIRUS
VIYQYMDDLY

SEQ ID NO: 12038 - protein, 10 aa, HUMAN IMMUNODEFICIENCY VIRUS
WGFTTPDKKH

SEQ ID NO: 12039 - protein, 10 aa, HUMAN IMMUNODEFICIENCY VIRUS
FTTPDKKHQK

SEQ ID NO: 12040 - protein, 11 aa, HUMAN IMMUNODEFICIENCY VIRUS
NNETPGIRYQY

SEQ ID NO: 12041 - protein, 11 aa, HUMAN IMMUNODEFICIENCY VIRUS
GFTTPDKKHQK

SEQ ID NO: 12042 - protein, 8 aa, HUMAN IMMUNODEFICIENCY VIRUS
PAGLKKKK

SEQ ID NO: 12043 - protein, 8 aa, HUMAN IMMUNODEFICIENCY VIRUS
SDLEIGQH

SEQ ID NO: 12044 - protein, 8 aa, HUMAN IMMUNODEFICIENCY VIRUS
DLEIGQHR

SEQ ID NO: 12045 - protein, 8 aa, HUMAN IMMUNODEFICIENCY VIRUS
WGFTTPDK

SEQ ID NO: 12046 - protein, 8 aa, HUMAN IMMUNODEFICIENCY VIRUS
GFTTPDKK

SEQ ID NO: 12047 - protein, 8 aa, HUMAN IMMUNODEFICIENCY VIRUS
KIQNFRVY

SEQ ID NO: 12048 - protein, 8 aa, HUMAN IMMUNODEFICIENCY VIRUS
VVPRRKAK

SEQ ID NO: 12049 - protein, 9 aa, HUMAN IMMUNODEFICIENCY VIRUS
ETPGIRYQY

SEQ ID NO: 12050 - protein, 9 aa, HUMAN IMMUNODEFICIENCY VIRUS
GSDLEIGQH

SEQ ID NO: 12051 - protein, 9 aa, HUMAN IMMUNODEFICIENCY VIRUS
SDLEIGQHR

SEQ ID NO: 12052 - protein, 9 aa, HUMAN IMMUNODEFICIENCY VIRUS
WGFTTPDKK

SEQ ID NO: 12053 - protein, 9 aa, HUMAN IMMUNODEFICIENCY VIRUS
KIQNFRVYY

SEQ ID NO: 12054 - protein, 9 aa, HUMAN IMMUNODEFICIENCY VIRUS
KVVPRRKAK

SEQ ID NO: 12055 - protein, 10 aa, HUMAN IMMUNODEFICIENCY VIRUS
VGSDLEIGQH

SEQ ID NO: 12056 - protein, 10 aa, HUMAN IMMUNODEFICIENCY VIRUS
GSDLEIGQHR

SEQ ID NO: 12057 - protein, 10 aa, HUMAN IMMUNODEFICIENCY VIRUS
KIQNFRVYYR

SEQ ID NO: 12058 - protein, 10 aa, HUMAN IMMUNODEFICIENCY VIRUS
NFRVYYRDSR

SEQ ID NO: 12059 - protein, 11 aa, HUMAN IMMUNODEFICIENCY VIRUS
IGGIGGFIKVR

SEQ ID NO: 12060 - protein, 11 aa, HUMAN IMMUNODEFICIENCY VIRUS
VGPTPVNIIGR

SEQ ID NO: 12061 - protein, 11 aa, HUMAN IMMUNODEFICIENCY VIRUS
YVGSDLEIGQH

SEQ ID NO: 12062 - protein, 11 aa, HUMAN IMMUNODEFICIENCY VIRUS
VGSDLEIGQHR

SEQ ID NO: 12063 - protein, 11 aa, HUMAN IMMUNODEFICIENCY VIRUS
GIPHPAGLKKK

SEQ ID NO: 12064 - protein, 8 aa, HUMAN IMMUNODEFICIENCY VIRUS
IGGFIKVR

SEQ ID NO: 12065 - protein, 8 aa, HUMAN IMMUNODEFICIENCY VIRUS
GFIKVRQY

SEQ ID NO: 12066 - protein, 8 aa, HUMAN IMMUNODEFICIENCY VIRUS
PIETVPVK

SEQ ID NO: 12067 - protein, 8 aa, HUMAN IMMUNODEFICIENCY VIRUS
ETVPVKLK

SEQ ID NO: 12068 - protein, 8 aa, HUMAN IMMUNODEFICIENCY VIRUS
ELELAENR

SEQ ID NO: 12069 - protein, 8 aa, HUMAN IMMUNODEFICIENCY VIRUS
QLKGEAMH

SEQ ID NO: 12070 - protein, 8 aa, HUMAN IMMUNODEFICIENCY VIRUS
ESMNKELK

SEQ ID NO: 12071 - protein, 8 aa, HUMAN IMMUNODEFICIENCY VIRUS
SMNKELKK

SEQ ID NO: 12072 - protein, 9 aa, HUMAN IMMUNODEFICIENCY VIRUS
GIGGFIKVR

SEQ ID NO: 12073 - protein, 9 aa, HUMAN IMMUNODEFICIENCY VIRUS
GGFIKVRQY

SEQ ID NO: 12074 - protein, 9 aa, HUMAN IMMUNODEFICIENCY VIRUS
ESMNKELKK

SEQ ID NO: 12075 - protein, 10 aa, HUMAN IMMUNODEFICIENCY VIRUS
GGIGGFIKVR

SEQ ID NO: 12076 - protein, 10 aa, HUMAN IMMUNODEFICIENCY VIRUS
IGGFIKVRQY

SEQ ID NO: 12077 - protein, 10 aa, HUMAN IMMUNODEFICIENCY VIRUS
ISPIETVPVK

SEQ ID NO: 12078 - protein, 10 aa, HUMAN IMMUNODEFICIENCY VIRUS
PIETVPVKLK

SEQ ID NO: 12079 - protein, 10 aa, HUMAN IMMUNODEFICIENCY VIRUS
EAELELAENR

SEQ ID NO: 12080 - protein, 10 aa, HUMAN IMMUNODEFICIENCY VIRUS
LVAVHVASGY

SEQ ID NO: 12081 - protein, 11 aa, HUMAN IMMUNODEFICIENCY VIRUS
GIGGFIKVRQY

SEQ ID NO: 12082 - protein, 11 aa, HUMAN IMMUNODEFICIENCY VIRUS
PISPIETVPVK

SEQ ID NO: 12083 - protein, 11 aa, HUMAN IMMUNODEFICIENCY VIRUS
ILVAVHVASGY

SEQ ID NO: 12084 - protein, 9 aa, HUMAN IMMUNODEFICIENCY VIRUS
FVNTPPLVK

SEQ ID NO: 12085 - protein, 10 aa, HUMAN IMMUNODEFICIENCY VIRUS
GIPHPAGLKK

SEQ ID NO: 12086 - protein, 11 aa, HUMAN IMMUNODEFICIENCY VIRUS
LGIPHPAGLKK

SEQ ID NO: 12087 - protein, 8 aa, HUMAN IMMUNODEFICIENCY VIRUS
QNFRVYYR

SEQ ID NO: 12088 - protein, 9 aa, HUMAN IMMUNODEFICIENCY VIRUS
PTPVNIIGR

SEQ ID NO: 12089 - protein, 9 aa, HUMAN IMMUNODEFICIENCY VIRUS
LAENREILK

SEQ ID NO: 12090 - protein, 10 aa, HUMAN IMMUNODEFICIENCY VIRUS
ELAENREILK

SEQ ID NO: 12091 - protein, 10 aa, HUMAN IMMUNODEFICIENCY VIRUS
EFVNTPPLVK

SEQ ID NO: 12092 - protein, 8 aa, HUMAN IMMUNODEFICIENCY VIRUS
PLTEEKIK

SEQ ID NO: 12093 - protein, 8 aa, HUMAN IMMUNODEFICIENCY VIRUS
LFLDGIDK

SEQ ID NO: 12094 - protein, 9 aa, HUMAN IMMUNODEFICIENCY VIRUS
GIPHPAGLK

SEQ ID NO: 12095 - protein, 10 aa, HUMAN IMMUNODEFICIENCY VIRUS
LGIPHPAGLK

SEQ ID NO: 12096 - protein, 11 aa, HUMAN IMMUNODEFICIENCY VIRUS
QLGIPHPAGLK

SEQ ID NO: 12097 - protein, 10 aa, HUMAN IMMUNODEFICIENCY VIRUS
VTVLDVGDAY

SEQ ID NO: 12098 - protein, 10 aa, HUMAN IMMUNODEFICIENCY VIRUS
ELKKIIGQVR

SEQ ID NO: 12099 - protein, 11 aa, HUMAN IMMUNODEFICIENCY VIRUS
DFWEVQLGIPH

SEQ ID NO: 12100 - protein, 11 aa, HUMAN IMMUNODEFICIENCY VIRUS
SVTVLDVGDAY

SEQ ID NO: 12101 - protein, 11 aa, HUMAN IMMUNODEFICIENCY VIRUS
KTAVQMAVFIH

SEQ ID NO: 12102 - protein, 8 aa, HUMAN IMMUNODEFICIENCY VIRUS
VNTPPLVK

SEQ ID NO: 12103 - protein, 9 aa, HUMAN IMMUNODEFICIENCY VIRUS
AIKKKDSTK

SEQ ID NO: 12104 - protein, 9 aa, HUMAN IMMUNODEFICIENCY VIRUS
TVLDVGDAY

SEQ ID NO: 12105 - protein, 9 aa, HUMAN IMMUNODEFICIENCY VIRUS
TTPDKKHQK

SEQ ID NO: 12106 - protein, 10 aa, HUMAN IMMUNODEFICIENCY VIRUS
FAIKKKDSTK

SEQ ID NO: 12107 - protein, 10 aa, HUMAN IMMUNODEFICIENCY VIRUS
NTPPLVKLWY

SEQ ID NO: 12108 - protein, 11 aa, HUMAN IMMUNODEFICIENCY VIRUS
AIKKKDSTKWR

SEQ ID NO: 12109 - protein, 11 aa, HUMAN IMMUNODEFICIENCY VIRUS
VNTPPLVKLWY

SEQ ID NO: 12110 - protein, 11 aa, HUMAN IMMUNODEFICIENCY VIRUS
MAVFIHNFKRK

SEQ ID NO: 12111 - protein, 11 aa, HUMAN IMMUNODEFICIENCY VIRUS
GGIGGYSAGER

SEQ ID NO: 12112 - protein, 8 aa, HUMAN IMMUNODEFICIENCY VIRUS
KDSTKWRK

SEQ ID NO: 12113 - protein, 8 aa, HUMAN IMMUNODEFICIENCY VIRUS
EVQLGIPH

SEQ ID NO: 12114 - protein, 8 aa, HUMAN IMMUNODEFICIENCY VIRUS
GGNEQVDK

SEQ ID NO: 12115 - protein, 8 aa, HUMAN IMMUNODEFICIENCY VIRUS
FIHNFKRK

SEQ ID NO: 12116 - protein, 8 aa, HUMAN IMMUNODEFICIENCY VIRUS
GGYSAGER

SEQ ID NO: 12117 - protein, 8 aa, HUMAN IMMUNODEFICIENCY VIRUS
RVYYRDSR

SEQ ID NO: 12118 - protein, 9 aa, HUMAN IMMUNODEFICIENCY VIRUS
IGGNEQVDK

SEQ ID NO: 12119 - protein, 9 aa, HUMAN IMMUNODEFICIENCY VIRUS
VFIHNFKRK

SEQ ID NO: 12120 - protein, 9 aa, HUMAN IMMUNODEFICIENCY VIRUS
IGGYSAGER

SEQ ID NO: 12121 - protein, 10 aa, HUMAN IMMUNODEFICIENCY VIRUS
GIGGNEQVDK

SEQ ID NO: 12122 - protein, 10 aa, HUMAN IMMUNODEFICIENCY VIRUS
PAETGQETAY

SEQ ID NO: 12123 - protein, 10 aa, HUMAN IMMUNODEFICIENCY VIRUS
AVFIHNFKRK

SEQ ID NO: 12124 - protein, 10 aa, HUMAN IMMUNODEFICIENCY VIRUS
GIGGYSAGER

SEQ ID NO: 12125 - protein, 11 aa, HUMAN IMMUNODEFICIENCY VIRUS
STKWRKLVDFR

SEQ ID NO: 12126 - protein, 11 aa, HUMAN IMMUNODEFICIENCY VIRUS
KGIGGNEQVDK

SEQ ID NO: 12127 - protein, 8 aa, HUMAN IMMUNODEFICIENCY VIRUS
AVHVASGY

SEQ ID NO: 12128 - protein, 8 aa, HUMAN IMMUNODEFICIENCY VIRUS
ETGQETAY

SEQ ID NO: 12129 - protein, 9 aa, HUMAN IMMUNODEFICIENCY VIRUS
GIWQLDCTH

SEQ ID NO: 12130 - protein, 9 aa, HUMAN IMMUNODEFICIENCY VIRUS
VAVHVASGY

SEQ ID NO: 12131 - protein, 9 aa, HUMAN IMMUNODEFICIENCY VIRUS
KGPAKLLWK

SEQ ID NO: 12132 - protein, 10 aa, HUMAN IMMUNODEFICIENCY VIRUS
EVNIVTDSQY

SEQ ID NO: 12133 - protein, 10 aa, HUMAN IMMUNODEFICIENCY VIRUS
PGIWQLDCTH

SEQ ID NO: 12134 - protein, 10 aa, HUMAN IMMUNODEFICIENCY VIRUS
TAVQMAVFIH

SEQ ID NO: 12135 - protein, 11 aa, HUMAN IMMUNODEFICIENCY VIRUS
VGKLNWASQIY

SEQ ID NO: 12136 - protein, 11 aa, HUMAN IMMUNODEFICIENCY VIRUS
NFKRKGGIGGY

SEQ ID NO: 12137 - protein, 10 aa, HUMAN IMMUNODEFICIENCY VIRUS
QLDCTHLEGK

SEQ ID NO: 12138 - protein, 8 aa, HUMAN IMMUNODEFICIENCY VIRUS
DFRELNKR

SEQ ID NO: 12139 - protein, 8 aa, HUMAN IMMUNODEFICIENCY VIRUS
VLDVGDAY

SEQ ID NO: 12140 - protein, 8 aa, HUMAN IMMUNODEFICIENCY VIRUS
KNLKTGKY

SEQ ID NO: 12141 - protein, 9 aa, HUMAN IMMUNODEFICIENCY VIRUS
VDFRELNKR

SEQ ID NO: 12142 - protein, 9 aa, HUMAN IMMUNODEFICIENCY VIRUS
MGYELHPDK

SEQ ID NO: 12143 - protein, 9 aa, HUMAN IMMUNODEFICIENCY VIRUS
KLNWASQIY

SEQ ID NO: 12144 - protein, 9 aa, HUMAN IMMUNODEFICIENCY VIRUS
AVQMAVFIH

SEQ ID NO: 12145 - protein, 9 aa, HUMAN IMMUNODEFICIENCY VIRUS
MAVFIHNFK

SEQ ID NO: 12146 - protein, 10 aa, HUMAN IMMUNODEFICIENCY VIRUS
LVDFRELNKR

SEQ ID NO: 12147 - protein, 10 aa, HUMAN IMMUNODEFICIENCY VIRUS
WMGYELHPDK

SEQ ID NO: 12148 - protein, 10 aa, HUMAN IMMUNODEFICIENCY VIRUS
QMAVFIHNFK

SEQ ID NO: 12149 - protein, 10 aa, HUMAN IMMUNODEFICIENCY VIRUS
MAVFIHNFKR

SEQ ID NO: 12150 - protein, 11 aa, HUMAN IMMUNODEFICIENCY VIRUS
KLVDFRELNKR

SEQ ID NO: 12151 - protein, 11 aa, HUMAN IMMUNODEFICIENCY VIRUS
QMAVFIHNFKR

SEQ ID NO: 12152 - protein, 8 aa, HUMAN IMMUNODEFICIENCY VIRUS
LNWASQIY

SEQ ID NO: 12153 - protein, 9 aa, HUMAN IMMUNODEFICIENCY VIRUS
NDIQKLVGK

SEQ ID NO: 12154 - protein, 9 aa, HUMAN IMMUNODEFICIENCY VIRUS
LDCTHLEGK

SEQ ID NO: 12155 - protein, 10 aa, HUMAN IMMUNODEFICIENCY VIRUS
VNDIQKLVGK

SEQ ID NO: 12156 - protein, 11 aa, HUMAN IMMUNODEFICIENCY VIRUS
TVNDIQKLVGK

SEQ ID NO: 12157 - protein, 8 aa, HUMAN IMMUNODEFICIENCY VIRUS
VDFRELNK

SEQ ID NO: 12158 - protein, 8 aa, HUMAN IMMUNODEFICIENCY VIRUS
WTVNDIQK

SEQ ID NO: 12159 - protein, 8 aa, HUMAN IMMUNODEFICIENCY VIRUS
DIQKLVGK

SEQ ID NO: 12160 - protein, 8 aa, HUMAN IMMUNODEFICIENCY VIRUS
NIVTDSQY

SEQ ID NO: 12161 - protein, 8 aa, HUMAN IMMUNODEFICIENCY VIRUS
DCTHLEGK

SEQ ID NO: 12162 - protein, 8 aa, HUMAN IMMUNODEFICIENCY VIRUS
AVFIHNFK

SEQ ID NO: 12163 - protein, 8 aa, HUMAN IMMUNODEFICIENCY VIRUS
VFIHNFKR

SEQ ID NO: 12164 - protein, 9 aa, HUMAN IMMUNODEFICIENCY VIRUS
LVDFRELNK

SEQ ID NO: 12165 - protein, 9 aa, HUMAN IMMUNODEFICIENCY VIRUS
VNIVTDSQY

SEQ ID NO: 12166 - protein, 9 aa, HUMAN IMMUNODEFICIENCY VIRUS
AVFIHNFKR

SEQ ID NO: 12167 - protein, 10 aa, HUMAN IMMUNODEFICIENCY VIRUS
MIGGIGGFIK

SEQ ID NO: 12168 - protein, 10 aa, HUMAN IMMUNODEFICIENCY VIRUS
KLVDFRELNK

SEQ ID NO: 12169 - protein, 11 aa, HUMAN IMMUNODEFICIENCY VIRUS
KMIGGIGGFIK

SEQ ID NO: 12170 - protein, 8 aa, HUMAN IMMUNODEFICIENCY VIRUS
NVLPQGWK

SEQ ID NO: 12171 - protein, 9 aa, HUMAN IMMUNODEFICIENCY VIRUS
IGGIGGFIK

SEQ ID NO: 12172 - protein, 9 aa, HUMAN IMMUNODEFICIENCY VIRUS
YNVLPQGWK

SEQ ID NO: 12173 - protein, 8 aa, HUMAN IMMUNODEFICIENCY VIRUS
GGIGGFIK

SEQ ID NO: 12174 - protein, 9 aa, HUMAN IMMUNODEFICIENCY VIRUS
FLWMGYELH

SEQ ID NO: 12175 - protein, 10 aa, HUMAN IMMUNODEFICIENCY VIRUS
PFLWMGYELH

SEQ ID NO: 12176 - protein, 9 aa, HUMAN IMMUNODEFICIENCY VIRUS
GTRQTRKNR

SEQ ID NO: 12177 - protein, 9 aa, HUMAN IMMUNODEFICIENCY VIRUS
TTRQARRNR

SEQ ID NO: 12178 - protein, 10 aa, HUMAN IMMUNODEFICIENCY VIRUS
GTRQTRKNRR

SEQ ID NO: 12179 - protein, 10 aa, HUMAN IMMUNODEFICIENCY VIRUS
TTRQARRNRR

SEQ ID NO: 12180 - protein, 11 aa, HUMAN IMMUNODEFICIENCY VIRUS
GTRQTRKNRRR

SEQ ID NO: 12181 - protein, 11 aa, HUMAN IMMUNODEFICIENCY VIRUS
TTRQARRNRRR

SEQ ID NO: 12182 - protein, 8 aa, HUMAN IMMUNODEFICIENCY VIRUS
GTETGVGR

SEQ ID NO: 12183 - protein, 9 aa, HUMAN IMMUNODEFICIENCY VIRUS
QGTETGVGR

SEQ ID NO: 12184 - protein, 9 aa, HUMAN IMMUNODEFICIENCY VIRUS
LLKTVRLIK

SEQ ID NO: 12185 - protein, 9 aa, HUMAN IMMUNODEFICIENCY VIRUS
GDSDEELLK

SEQ ID NO: 12186 - protein, 9 aa, HUMAN IMMUNODEFICIENCY VIRUS
PLQLPPIER

SEQ ID NO: 12187 - protein, 10 aa, HUMAN IMMUNODEFICIENCY VIRUS
SGDSDEELLK

SEQ ID NO: 12188 - protein, 11 aa, HUMAN IMMUNODEFICIENCY VIRUS
RSGDSDEELLK

SEQ ID NO: 12189 - protein, 11 aa, HUMAN IMMUNODEFICIENCY VIRUS
PVPLQLPPIER

SEQ ID NO: 12190 - protein, 8 aa, HUMAN IMMUNODEFICIENCY VIRUS
RARQRQIR

SEQ ID NO: 12191 - protein, 8 aa, HUMAN IMMUNODEFICIENCY VIRUS
DSDEELLK

SEQ ID NO: 12192 - protein, 8 aa, HUMAN IMMUNODEFICIENCY VIRUS
ILSTCLGR

SEQ ID NO: 12193 - protein, 9 aa, HUMAN IMMUNODEFICIENCY VIRUS
RILSTCLGR

SEQ ID NO: 12194 - protein, 11 aa, HUMAN IMMUNODEFICIENCY VIRUS
SNPPPSPEGTR

SEQ ID NO: 12195 - protein, 9 aa, HUMAN IMMUNODEFICIENCY VIRUS
AVRIIKILY

SEQ ID NO: 12196 - protein, 9 aa, HUMAN IMMUNODEFICIENCY VIRUS
QLPPLERLH

SEQ ID NO: 12197 - protein, 10 aa, HUMAN IMMUNODEFICIENCY VIRUS
PSPEGTRQAR

SEQ ID NO: 12198 - protein, 10 aa, HUMAN IMMUNODEFICIENCY VIRUS
RNRRRRWRER

SEQ ID NO: 12199 - protein, 11 aa, HUMAN IMMUNODEFICIENCY VIRUS
PSPEGTRQARR

SEQ ID NO: 12200 - protein, 11 aa, HUMAN IMMUNODEFICIENCY VIRUS
PLQLPPLERLH

SEQ ID NO: 12201 - protein, 11 aa, HUMAN IMMUNODEFICIENCY VIRUS
GTRQARKNRRR

SEQ ID NO: 12202 - protein, 8 aa, HUMAN IMMUNODEFICIENCY VIRUS
RARQRQIH

SEQ ID NO: 12203 - protein, 9 aa, HUMAN IMMUNODEFICIENCY VIRUS
GTRQARKNR

SEQ ID NO: 12204 - protein, 10 aa, HUMAN IMMUNODEFICIENCY VIRUS
GTRQARKNRR

SEQ ID NO: 12205 - protein, 9 aa, HUMAN IMMUNODEFICIENCY VIRUS
QARKNRRRR

SEQ ID NO: 12206 - protein, 11 aa, HUMAN IMMUNODEFICIENCY VIRUS
QARKNRRRRWR

SEQ ID NO: 12207 - protein, 8 aa, HUMAN IMMUNODEFICIENCY VIRUS
QARKNRRR

SEQ ID NO: 12208 - protein, 11 aa, HUMAN IMMUNODEFICIENCY VIRUS
IIKILYQSNPY

SEQ ID NO: 12209 - protein, 10 aa, HUMAN IMMUNODEFICIENCY VIRUS
KNRRRRWRAR

SEQ ID NO: 12210 - protein, 8 aa, HUMAN IMMUNODEFICIENCY VIRUS
KNRRRRWR

SEQ ID NO: 12211 - protein, 10 aa, HUMAN IMMUNODEFICIENCY VIRUS
RNRRRRWRAR

SEQ ID NO: 12212 - protein, 9 aa, HUMAN IMMUNODEFICIENCY VIRUS
KILYQSNPY

SEQ ID NO: 12213 - protein, 8 aa, HUMAN IMMUNODEFICIENCY VIRUS
ILYQSNPY

SEQ ID NO: 12214 - protein, 8 aa, HUMAN IMMUNODEFICIENCY VIRUS
EGTRQARR

SEQ ID NO: 12215 - protein, 10 aa, HUMAN IMMUNODEFICIENCY VIRUS
EGTRQARRNR

SEQ ID NO: 12216 - protein, 11 aa, HUMAN IMMUNODEFICIENCY VIRUS
EGTRQARRNRR

SEQ ID NO: 12217 - protein, 9 aa, HUMAN IMMUNODEFICIENCY VIRUS
GTRQARRNR

SEQ ID NO: 12218 - protein, 10 aa, HUMAN IMMUNODEFICIENCY VIRUS
GTRQARRNRR

SEQ ID NO: 12219 - protein, 11 aa, HUMAN IMMUNODEFICIENCY VIRUS
GTRQARRNRRR

SEQ ID NO: 12220 - protein, 11 aa, HUMAN IMMUNODEFICIENCY VIRUS
PVPLQLPPLER

SEQ ID NO: 12221 - protein, 9 aa, HUMAN IMMUNODEFICIENCY VIRUS
PLQLPPLER

SEQ ID NO: 12222 - protein, 11 aa, HUMAN IMMUNODEFICIENCY VIRUS
QARRNRRRRWR

SEQ ID NO: 12223 - protein, 8 aa, HUMAN IMMUNODEFICIENCY VIRUS
QARRNRRR

SEQ ID NO: 12224 - protein, 9 aa, HUMAN IMMUNODEFICIENCY VIRUS
QARRNRRRR

SEQ ID NO: 12225 - protein, 8 aa, HUMAN IMMUNODEFICIENCY VIRUS
RNRRRRWR

SEQ ID NO: 12226 - protein, 8 aa, HUMAN IMMUNODEFICIENCY VIRUS
PGGYPRRK

SEQ ID NO: 12227 - protein, 9 aa, HUMAN IMMUNODEFICIENCY VIRUS
AGPGGYPRR

SEQ ID NO: 12228 - protein, 9 aa, HUMAN IMMUNODEFICIENCY VIRUS
TGPSGQPCH

SEQ ID NO: 12229 - protein, 10 aa, HUMAN IMMUNODEFICIENCY VIRUS
ETGPSGQPCH

SEQ ID NO: 12230 - protein, 10 aa, HUMAN IMMUNODEFICIENCY VIRUS
KAGPGGYPRR

SEQ ID NO: 12231 - protein, 10 aa, HUMAN IMMUNODEFICIENCY VIRUS
AGPGGYPRRK

SEQ ID NO: 12232 - protein, 11 aa, HUMAN IMMUNODEFICIENCY VIRUS
KAGPGGYPRRK

SEQ ID NO: 12233 - protein, 11 aa, HUMAN IMMUNODEFICIENCY VIRUS
GGYPRRKGSCH

SEQ ID NO: 12234 - protein, 8 aa, HUMAN IMMUNODEFICIENCY VIRUS
ACTNCYCK

SEQ ID NO: 12235 - protein, 9 aa, HUMAN IMMUNODEFICIENCY VIRUS
TACTNCYCK

SEQ ID NO: 12236 - protein, 8 aa, HUMAN IMMUNODEFICIENCY VIRUS
CNNCYCKK

SEQ ID NO: 12237 - protein, 8 aa, HUMAN IMMUNODEFICIENCY VIRUS
YCKKCCFH

SEQ ID NO: 12238 - protein, 8 aa, HUMAN IMMUNODEFICIENCY VIRUS
YCKKCCYH

SEQ ID NO: 12239 - protein, 9 aa, HUMAN IMMUNODEFICIENCY VIRUS
VDPRLEPWK

SEQ ID NO: 12240 - protein, 9 aa, HUMAN IMMUNODEFICIENCY VIRUS
ACNNCYCKK

SEQ ID NO: 12241 - protein, 10 aa, HUMAN IMMUNODEFICIENCY VIRUS
PVDPRLEPWK

SEQ ID NO: 12242 - protein, 10 aa, HUMAN IMMUNODEFICIENCY VIRUS
VDPRLEPWKH

SEQ ID NO: 12243 - protein, 10 aa, HUMAN IMMUNODEFICIENCY VIRUS
TACNNCYCKK

SEQ ID NO: 12244 - protein, 11 aa, HUMAN IMMUNODEFICIENCY VIRUS
PVDPRLEPWKH

SEQ ID NO: 12245 - protein, 11 aa, HUMAN IMMUNODEFICIENCY VIRUS
RGDPTGPKESK

SEQ ID NO: 12246 - protein, 11 aa, HUMAN IMMUNODEFICIENCY VIRUS
GDPTGPKESKK

SEQ ID NO: 12247 - protein, 9 aa, HUMAN IMMUNODEFICIENCY VIRUS
ESKKKVESK

SEQ ID NO: 12248 - protein, 10 aa, HUMAN IMMUNODEFICIENCY VIRUS
GDPTGPKESK

SEQ ID NO: 12249 - protein, 10 aa, HUMAN IMMUNODEFICIENCY VIRUS
PTGPKESKKK

SEQ ID NO: 12250 - protein, 9 aa, HUMAN IMMUNODEFICIENCY VIRUS
TGPKESKKK

SEQ ID NO: 12251 - protein, 9 aa, HUMAN IMMUNODEFICIENCY VIRUS
LNKGLGISY

SEQ ID NO: 12252 - protein, 10 aa, HUMAN IMMUNODEFICIENCY VIRUS
FLNKGLGISY

SEQ ID NO: 12253 - protein, 11 aa, HUMAN IMMUNODEFICIENCY VIRUS
PVDPNLEPWNH

SEQ ID NO: 12254 - protein, 11 aa, HUMAN IMMUNODEFICIENCY VIRUS
CFLNKGLGISY

SEQ ID NO: 12255 - protein, 11 aa, HUMAN IMMUNODEFICIENCY VIRUS
LNKGLGISYGR

SEQ ID NO: 12256 - protein, 9 aa, HUMAN IMMUNODEFICIENCY VIRUS
WNHPGSQPK

SEQ ID NO: 12257 - protein, 8 aa, HUMAN IMMUNODEFICIENCY VIRUS
RGDPTGPK

SEQ ID NO: 12258 - protein, 10 aa, HUMAN IMMUNODEFICIENCY VIRUS
VDPNLEPWNH

SEQ ID NO: 12259 - protein, 8 aa, HUMAN IMMUNODEFICIENCY VIRUS
PNLEPWNH

SEQ ID NO: 12260 - protein, 8 aa, HUMAN IMMUNODEFICIENCY VIRUS
ACNNCYCK

SEQ ID NO: 12261 - protein, 9 aa, HUMAN IMMUNODEFICIENCY VIRUS
TACNNCYCK

SEQ ID NO: 12262 - protein, 9 aa, HUMAN IMMUNODEFICIENCY VIRUS
PTGPKESKK

SEQ ID NO: 12263 - protein, 8 aa, HUMAN IMMUNODEFICIENCY VIRUS
TGPKESKK

SEQ ID NO: 12264 - protein, 8 aa, HUMAN IMMUNODEFICIENCY VIRUS
PTGPKESK

SEQ ID NO: 12265 - protein, 11 aa, HUMAN IMMUNODEFICIENCY VIRUS
YGRKKRRQRRR

SEQ ID NO: 12266 - protein, 10 aa, HUMAN IMMUNODEFICIENCY VIRUS
YGRKKRRQRR

SEQ ID NO: 12267 - protein, 11 aa, HUMAN IMMUNODEFICIENCY VIRUS
ISYGRKKRRQR

SEQ ID NO: 12268 - protein, 9 aa, HUMAN IMMUNODEFICIENCY VIRUS
YGRKKRRQR

SEQ ID NO: 12269 - protein, 10 aa, HUMAN IMMUNODEFICIENCY VIRUS
GISYGRKKRR

SEQ ID NO: 12270 - protein, 11 aa, HUMAN IMMUNODEFICIENCY VIRUS
LGISYGRKKRR

SEQ ID NO: 12271 - protein, 9 aa, HUMAN IMMUNODEFICIENCY VIRUS
ISYGRKKRR

SEQ ID NO: 12272 - protein, 11 aa, HUMAN IMMUNODEFICIENCY VIRUS
GLGISYGRKKR

SEQ ID NO: 12273 - protein, 8 aa, HUMAN IMMUNODEFICIENCY VIRUS
GLGISYGR

SEQ ID NO: 12274 - protein, 9 aa, HUMAN IMMUNODEFICIENCY VIRUS
GLGISYGRK

SEQ ID NO: 12275 - protein, 10 aa, HUMAN IMMUNODEFICIENCY VIRUS
GLGISYGRKK

SEQ ID NO: 12276 - protein, 9 aa, HUMAN IMMUNODEFICIENCY VIRUS
KGLGISYGR

SEQ ID NO: 12277 - protein, 10 aa, HUMAN IMMUNODEFICIENCY VIRUS
KGLGISYGRK

SEQ ID NO: 12278 - protein, 11 aa, HUMAN IMMUNODEFICIENCY VIRUS
KGLGISYGRKK

SEQ ID NO: 12279 - protein, 9 aa, HUMAN IMMUNODEFICIENCY VIRUS
GISYGRKKR

SEQ ID NO: 12280 - protein, 10 aa, HUMAN IMMUNODEFICIENCY VIRUS
LGISYGRKKR

SEQ ID NO: 12281 - protein, 8 aa, HUMAN IMMUNODEFICIENCY VIRUS
LGISYGRK

SEQ ID NO: 12282 - protein, 8 aa, HUMAN IMMUNODEFICIENCY VIRUS
GISYGRKK

SEQ ID NO: 12283 - protein, 8 aa, HUMAN IMMUNODEFICIENCY VIRUS
ISYGRKKR

SEQ ID NO: 12284 - protein, 9 aa, HUMAN IMMUNODEFICIENCY VIRUS
LGISYGRKK

SEQ ID NO: 12285 - protein, 8 aa, HUMAN IMMUNODEFICIENCY VIRUS
LIVWQVDR

SEQ ID NO: 12286 - protein, 8 aa, HUMAN IMMUNODEFICIENCY VIRUS
RMRINTWK

SEQ ID NO: 12287 - protein, 8 aa, HUMAN IMMUNODEFICIENCY VIRUS
LIKPKKIK

SEQ ID NO: 12288 - protein, 9 aa, HUMAN IMMUNODEFICIENCY VIRUS
KGWFYRHHY

SEQ ID NO: 12289 - protein, 9 aa, HUMAN IMMUNODEFICIENCY VIRUS
ALIKPKKIK

SEQ ID NO: 12290 - protein, 10 aa, HUMAN IMMUNODEFICIENCY VIRUS
VDRMRINTWK

SEQ ID NO: 12291 - protein, 10 aa, HUMAN IMMUNODEFICIENCY VIRUS
GVSIEWRLRR

SEQ ID NO: 12292 - protein, 11 aa, HUMAN IMMUNODEFICIENCY VIRUS
QVDRMRINTWK

SEQ ID NO: 12293 - protein, 11 aa, HUMAN IMMUNODEFICIENCY VIRUS
RLVITTYWGLH

SEQ ID NO: 12294 - protein, 11 aa, HUMAN IMMUNODEFICIENCY VIRUS
QTGERDWHLGH

SEQ ID NO: 12295 - protein, 11 aa, HUMAN IMMUNODEFICIENCY VIRUS
GVSIEWRLRRY

SEQ ID NO: 12296 - protein, 11 aa, HUMAN IMMUNODEFICIENCY VIRUS
IDPDLADQLIH

SEQ ID NO: 12297 - protein, 11 aa, HUMAN IMMUNODEFICIENCY VIRUS
LVEDRWNKPQK

SEQ ID NO: 12298 - protein, 8 aa, HUMAN IMMUNODEFICIENCY VIRUS
SIEWRLRR

SEQ ID NO: 12299 - protein, 8 aa, HUMAN IMMUNODEFICIENCY VIRUS
TALIKPKK

SEQ ID NO: 12300 - protein, 8 aa, HUMAN IMMUNODEFICIENCY VIRUS
LVEDRWNK

SEQ ID NO: 12301 - protein, 9 aa, HUMAN IMMUNODEFICIENCY VIRUS
VSIEWRLRR

SEQ ID NO: 12302 - protein, 9 aa, HUMAN IMMUNODEFICIENCY VIRUS
SIEWRLRRY

SEQ ID NO: 12303 - protein, 9 aa, HUMAN IMMUNODEFICIENCY VIRUS
LTALIKPKK

SEQ ID NO: 12304 - protein, 9 aa, HUMAN IMMUNODEFICIENCY VIRUS
KLVEDRWNK

SEQ ID NO: 12305 - protein, 10 aa, HUMAN IMMUNODEFICIENCY VIRUS
VSIEWRLRRY

SEQ ID NO: 12306 - protein, 10 aa, HUMAN IMMUNODEFICIENCY VIRUS
GLADQLIHMH

SEQ ID NO: 12307 - protein, 10 aa, HUMAN IMMUNODEFICIENCY VIRUS
ALTALIKPKK

SEQ ID NO: 12308 - protein, 10 aa, HUMAN IMMUNODEFICIENCY VIRUS
WNKPQKTRGH

SEQ ID NO: 12309 - protein, 11 aa, HUMAN IMMUNODEFICIENCY VIRUS
PGLADQLIHMH

SEQ ID NO: 12310 - protein, 11 aa, HUMAN IMMUNODEFICIENCY VIRUS
GLADQLIHMHY

SEQ ID NO: 12311 - protein, 11 aa, HUMAN IMMUNODEFICIENCY VIRUS
LALTALIKPKK

SEQ ID NO: 12312 - protein, 11 aa, HUMAN IMMUNODEFICIENCY VIRUS
WNKPQKTRGHR

SEQ ID NO: 12313 - protein, 11 aa, HUMAN IMMUNODEFICIENCY VIRUS
WFYRHHYESRH

SEQ ID NO: 12314 - protein, 8 aa, HUMAN IMMUNODEFICIENCY VIRUS
KGWFYRHH

SEQ ID NO: 12315 - protein, 8 aa, HUMAN IMMUNODEFICIENCY VIRUS
WGLQTGER

SEQ ID NO: 12316 - protein, 8 aa, HUMAN IMMUNODEFICIENCY VIRUS
QTGERDWH

SEQ ID NO: 12317 - protein, 9 aa, HUMAN IMMUNODEFICIENCY VIRUS
IVWQVDRMK

SEQ ID NO: 12318 - protein, 10 aa, HUMAN IMMUNODEFICIENCY VIRUS
KIRTWNSLVK

SEQ ID NO: 12319 - protein, 10 aa, HUMAN IMMUNODEFICIENCY VIRUS
LVKHHMYVSK

SEQ ID NO: 12320 - protein, 10 aa, HUMAN IMMUNODEFICIENCY VIRUS
GLQTGERDWH

SEQ ID NO: 12321 - protein, 10 aa, HUMAN IMMUNODEFICIENCY VIRUS
TGERDWHLGH

SEQ ID NO: 12322 - protein, 10 aa, HUMAN IMMUNODEFICIENCY VIRUS
HGVSIEWRLR

SEQ ID NO: 12323 - protein, 11 aa, HUMAN IMMUNODEFICIENCY VIRUS
IVWQVDRMKIR

SEQ ID NO: 12324 - protein, 11 aa, HUMAN IMMUNODEFICIENCY VIRUS
KIRTWNSLVKH

SEQ ID NO: 12325 - protein, 11 aa, HUMAN IMMUNODEFICIENCY VIRUS
SLVKHHMYVSK

SEQ ID NO: 12326 - protein, 11 aa, HUMAN IMMUNODEFICIENCY VIRUS
LVKHHMYVSKK

SEQ ID NO: 12327 - protein, 11 aa, HUMAN IMMUNODEFICIENCY VIRUS
WGLQTGERDWH

SEQ ID NO: 12328 - protein, 10 aa, HUMAN IMMUNODEFICIENCY VIRUS
WFYRHHYESR

SEQ ID NO: 12329 - protein, 8 aa, HUMAN IMMUNODEFICIENCY VIRUS
QVDRMKIR

SEQ ID NO: 12330 - protein, 8 aa, HUMAN IMMUNODEFICIENCY VIRUS
HIPLGDAR

SEQ ID NO: 12331 - protein, 8 aa, HUMAN IMMUNODEFICIENCY VIRUS
ADQLIHMH

SEQ ID NO: 12332 - protein, 8 aa, HUMAN IMMUNODEFICIENCY VIRUS
CFSDSAIR

SEQ ID NO: 12333 - protein, 8 aa, HUMAN IMMUNODEFICIENCY VIRUS
FSDSAIRK

SEQ ID NO: 12334 - protein, 8 aa, HUMAN IMMUNODEFICIENCY VIRUS
SLQYLALK

SEQ ID NO: 12335 - protein, 8 aa, HUMAN IMMUNODEFICIENCY VIRUS
LTALIKPK

SEQ ID NO: 12336 - protein, 9 aa, HUMAN IMMUNODEFICIENCY VIRUS
LADQLIHMH

SEQ ID NO: 12337 - protein, 9 aa, HUMAN IMMUNODEFICIENCY VIRUS
ADQLIHMHY

SEQ ID NO: 12338 - protein, 9 aa, HUMAN IMMUNODEFICIENCY VIRUS
CFSDSAIRK

SEQ ID NO: 12339 - protein, 9 aa, HUMAN IMMUNODEFICIENCY VIRUS
GSLQYLALK

SEQ ID NO: 12340 - protein, 9 aa, HUMAN IMMUNODEFICIENCY VIRUS
ALTALIKPK

SEQ ID NO: 12341 - protein, 9 aa, HUMAN IMMUNODEFICIENCY VIRUS
SVKKLTEDR

SEQ ID NO: 12342 - protein, 10 aa, HUMAN IMMUNODEFICIENCY VIRUS
EVHIPLGDAR

SEQ ID NO: 12343 - protein, 10 aa, HUMAN IMMUNODEFICIENCY VIRUS
LADQLIHMHY

SEQ ID NO: 12344 - protein, 10 aa, HUMAN IMMUNODEFICIENCY VIRUS
DCFSESAIRK

SEQ ID NO: 12345 - protein, 10 aa, HUMAN IMMUNODEFICIENCY VIRUS
VGSLQYLALK

SEQ ID NO: 12346 - protein, 10 aa, HUMAN IMMUNODEFICIENCY VIRUS
LALTALIKPK

SEQ ID NO: 12347 - protein, 10 aa, HUMAN IMMUNODEFICIENCY VIRUS
PSVKKLTEDR

SEQ ID NO: 12348 - protein, 11 aa, HUMAN IMMUNODEFICIENCY VIRUS
FDCFSESAIRK

SEQ ID NO: 12349 - protein, 11 aa, HUMAN IMMUNODEFICIENCY VIRUS
YLALTALIKPK

SEQ ID NO: 12350 - protein, 8 aa, HUMAN IMMUNODEFICIENCY VIRUS
FSESAIRK

SEQ ID NO: 12351 - protein, 8 aa, HUMAN IMMUNODEFICIENCY VIRUS
IVSPRCEY

SEQ ID NO: 12352 - protein, 9 aa, HUMAN IMMUNODEFICIENCY VIRUS
GVSIEWRLR

SEQ ID NO: 12353 - protein, 9 aa, HUMAN IMMUNODEFICIENCY VIRUS
ADQLIHLYY

SEQ ID NO: 12354 - protein, 9 aa, HUMAN IMMUNODEFICIENCY VIRUS
CFSESAIRK

SEQ ID NO: 12355 - protein, 10 aa, HUMAN IMMUNODEFICIENCY VIRUS
VDRMRIRTWK

SEQ ID NO: 12356 - protein, 10 aa, HUMAN IMMUNODEFICIENCY VIRUS
LADQLIHLYY

SEQ ID NO: 12357 - protein, 10 aa, HUMAN IMMUNODEFICIENCY VIRUS
RCDYQAGHNK

SEQ ID NO: 12358 - protein, 11 aa, HUMAN IMMUNODEFICIENCY VIRUS
QVDRMRIRTWK

SEQ ID NO: 12359 - protein, 11 aa, HUMAN IMMUNODEFICIENCY VIRUS
RIRTWNSLVKH

SEQ ID NO: 12360 - protein, 8 aa, HUMAN IMMUNODEFICIENCY VIRUS
RMRIRTWK

SEQ ID NO: 12361 - protein, 8 aa, HUMAN IMMUNODEFICIENCY VIRUS
RTWKSLVK

SEQ ID NO: 12362 - protein, 8 aa, HUMAN IMMUNODEFICIENCY VIRUS
VSIEWRLR

SEQ ID NO: 12363 - protein, 8 aa, HUMAN IMMUNODEFICIENCY VIRUS
ADQLIHLY

SEQ ID NO: 12364 - protein, 9 aa, HUMAN IMMUNODEFICIENCY VIRUS
RTWKSLVKH

SEQ ID NO: 12365 - protein, 9 aa, HUMAN IMMUNODEFICIENCY VIRUS
QGVSIEWRK

SEQ ID NO: 12366 - protein, 9 aa, HUMAN IMMUNODEFICIENCY VIRUS
LADQLIHLY

SEQ ID NO: 12367 - protein, 9 aa, HUMAN IMMUNODEFICIENCY VIRUS
AIRKAILGH

SEQ ID NO: 12368 - protein, 9 aa, HUMAN IMMUNODEFICIENCY VIRUS
CDYQAGHNK

SEQ ID NO: 12369 - protein, 10 aa, HUMAN IMMUNODEFICIENCY VIRUS
RIRTWKSLVK

SEQ ID NO: 12370 - protein, 10 aa, HUMAN IMMUNODEFICIENCY VIRUS
RIRTWNSLVK

SEQ ID NO: 12371 - protein, 10 aa, HUMAN IMMUNODEFICIENCY VIRUS
RTWKSLVKHH

SEQ ID NO: 12372 - protein, 10 aa, HUMAN IMMUNODEFICIENCY VIRUS
SAIRKAILGH

SEQ ID NO: 12373 - protein, 11 aa, HUMAN IMMUNODEFICIENCY VIRUS
RIRTWKSLVKH

SEQ ID NO: 12374 - protein, 11 aa, HUMAN IMMUNODEFICIENCY VIRUS
LGQGVSIEWRK

SEQ ID NO: 12375 - protein, 11 aa, HUMAN IMMUNODEFICIENCY VIRUS
VDPGLADQLIH

SEQ ID NO: 12376 - protein, 8 aa, HUMAN IMMUNODEFICIENCY VIRUS
ITTYWGLH

SEQ ID NO: 12377 - protein, 8 aa, HUMAN IMMUNODEFICIENCY VIRUS
GVSIEWRK

SEQ ID NO: 12378 - protein, 8 aa, HUMAN IMMUNODEFICIENCY VIRUS
RCDYQAGH

SEQ ID NO: 12379 - protein, 8 aa, HUMAN IMMUNODEFICIENCY VIRUS
LALTALIK

SEQ ID NO: 12380 - protein, 9 aa, HUMAN IMMUNODEFICIENCY VIRUS
VITTYWGLH

SEQ ID NO: 12381 - protein, 9 aa, HUMAN IMMUNODEFICIENCY VIRUS
YLALTALIK

SEQ ID NO: 12382 - protein, 9 aa, HUMAN IMMUNODEFICIENCY VIRUS
KTKGHRGSH

SEQ ID NO: 12383 - protein, 10 aa, HUMAN IMMUNODEFICIENCY VIRUS
LVITTYWGLH

SEQ ID NO: 12384 - protein, 10 aa, HUMAN IMMUNODEFICIENCY VIRUS
WNKPQKTKGH

SEQ ID NO: 12385 - protein, 11 aa, HUMAN IMMUNODEFICIENCY VIRUS
WNKPQKTKGHR

SEQ ID NO: 12386 - protein, 11 aa, HUMAN IMMUNODEFICIENCY VIRUS
EDRWNKPQKTR

SEQ ID NO: 12387 - protein, 8 aa, HUMAN IMMUNODEFICIENCY VIRUS
WNKPQKTK

SEQ ID NO: 12388 - protein, 9 aa, HUMAN IMMUNODEFICIENCY VIRUS
KSLVKHHMY

SEQ ID NO: 12389 - protein, 11 aa, HUMAN IMMUNODEFICIENCY VIRUS
EDRWNKPQKTK

SEQ ID NO: 12390 - protein, 10 aa, HUMAN IMMUNODEFICIENCY VIRUS
RCEYQAGHNK

SEQ ID NO: 12391 - protein, 8 aa, HUMAN IMMUNODEFICIENCY VIRUS
HIPLGEAR

SEQ ID NO: 12392 - protein, 8 aa, HUMAN IMMUNODEFICIENCY VIRUS
WNKPQKTR

SEQ ID NO: 12393 - protein, 10 aa, HUMAN IMMUNODEFICIENCY VIRUS
EVHIPLGEAR

SEQ ID NO: 12394 - protein, 8 aa, HUMAN IMMUNODEFICIENCY VIRUS
HTGERDWH

SEQ ID NO: 12395 - protein, 8 aa, HUMAN IMMUNODEFICIENCY VIRUS
DLADQLIH

SEQ ID NO: 12396 - protein, 9 aa, HUMAN IMMUNODEFICIENCY VIRUS
PDLADQLIH

SEQ ID NO: 12397 - protein, 10 aa, HUMAN IMMUNODEFICIENCY VIRUS
GLHTGERDWH

SEQ ID NO: 12398 - protein, 11 aa, HUMAN IMMUNODEFICIENCY VIRUS
WGLHTGERDWH

SEQ ID NO: 12399 - protein, 11 aa, HUMAN IMMUNODEFICIENCY VIRUS
VSPRCEYQAGH

SEQ ID NO: 12400 - protein, 11 aa, HUMAN IMMUNODEFICIENCY VIRUS
LTEDRWNKPQK

SEQ ID NO: 12401 - protein, 8 aa, HUMAN IMMUNODEFICIENCY VIRUS
GSHTMNGH

SEQ ID NO: 12402 - protein, 9 aa, HUMAN IMMUNODEFICIENCY VIRUS
RGSHTMNGH

SEQ ID NO: 12403 - protein, 11 aa, HUMAN IMMUNODEFICIENCY VIRUS
TTYWGLHTGER

SEQ ID NO: 12404 - protein, 11 aa, HUMAN IMMUNODEFICIENCY VIRUS
HLGHGVSIEWR

SEQ ID NO: 12405 - protein, 9 aa, HUMAN IMMUNODEFICIENCY VIRUS
NSLVKHHMY

SEQ ID NO: 12406 - protein, 10 aa, HUMAN IMMUNODEFICIENCY VIRUS
WNSLVKHHMY

SEQ ID NO: 12407 - protein, 8 aa, HUMAN IMMUNODEFICIENCY VIRUS
QGVSIEWR

SEQ ID NO: 12408 - protein, 10 aa, HUMAN IMMUNODEFICIENCY VIRUS
LGQGVSIEWR

SEQ ID NO: 12409 - protein, 11 aa, HUMAN IMMUNODEFICIENCY VIRUS
HLGQGVSIEWR

SEQ ID NO: 12410 - protein, 8 aa, HUMAN IMMUNODEFICIENCY VIRUS
RCEYQAGH

SEQ ID NO: 12411 - protein, 9 aa, HUMAN IMMUNODEFICIENCY VIRUS
RTWNSLVKH

SEQ ID NO: 12412 - protein, 10 aa, HUMAN IMMUNODEFICIENCY VIRUS
RTWNSLVKHH

SEQ ID NO: 12413 - protein, 8 aa, HUMAN IMMUNODEFICIENCY VIRUS
RTWNSLVK

SEQ ID NO: 12414 - protein, 8 aa, HUMAN IMMUNODEFICIENCY VIRUS
HGVSIEWR

SEQ ID NO: 12415 - protein, 8 aa, HUMAN IMMUNODEFICIENCY VIRUS
GLADQLIH

SEQ ID NO: 12416 - protein, 9 aa, HUMAN IMMUNODEFICIENCY VIRUS
PGLADQLIH

SEQ ID NO: 12417 - protein, 10 aa, HUMAN IMMUNODEFICIENCY VIRUS
LGHGVSIEWR

SEQ ID NO: 12418 - protein, 11 aa, HUMAN IMMUNODEFICIENCY VIRUS
YFDCFSESAIR

SEQ ID NO: 12419 - protein, 8 aa, HUMAN IMMUNODEFICIENCY VIRUS
WGLHTGER

SEQ ID NO: 12420 - protein, 9 aa, HUMAN IMMUNODEFICIENCY VIRUS
DCFSESAIR

SEQ ID NO: 12421 - protein, 10 aa, HUMAN IMMUNODEFICIENCY VIRUS
FDCFSESAIR

SEQ ID NO: 12422 - protein, 8 aa, HUMAN IMMUNODEFICIENCY VIRUS
WNSLVKHH

SEQ ID NO: 12423 - protein, 8 aa, HUMAN IMMUNODEFICIENCY VIRUS
CFSESAIR

SEQ ID NO: 12424 - protein, 9 aa, HUMAN IMMUNODEFICIENCY VIRUS
KLTEDRWNK

SEQ ID NO: 12425 - protein, 8 aa, HUMAN IMMUNODEFICIENCY VIRUS
LTEDRWNK

SEQ ID NO: 12426 - protein, 11 aa, HUMAN IMMUNODEFICIENCY VIRUS
IVWQVDRMRIR

SEQ ID NO: 12427 - protein, 8 aa, HUMAN IMMUNODEFICIENCY VIRUS
QVDRMRIR

SEQ ID NO: 12428 - protein, 9 aa, HUMAN IMMUNODEFICIENCY VIRUS
EDRWNKPQK

SEQ ID NO: 12429 - protein, 11 aa, HUMAN IMMUNODEFICIENCY VIRUS
VMIVWQVDRMR

SEQ ID NO: 12430 - protein, 10 aa, HUMAN IMMUNODEFICIENCY VIRUS
QVMIVWQVDR

SEQ ID NO: 12431 - protein, 10 aa, HUMAN IMMUNODEFICIENCY VIRUS
MIVWQVDRMR

SEQ ID NO: 12432 - protein, 11 aa, HUMAN IMMUNODEFICIENCY VIRUS
AGHNKVGSLQY

SEQ ID NO: 12433 - protein, 8 aa, HUMAN IMMUNODEFICIENCY VIRUS
SLVKHHMY

SEQ ID NO: 12434 - protein, 9 aa, HUMAN IMMUNODEFICIENCY VIRUS
VMIVWQVDR

SEQ ID NO: 12435 - protein, 8 aa, HUMAN IMMUNODEFICIENCY VIRUS
MIVWQVDR

SEQ ID NO: 12436 - protein, 9 aa, HUMAN IMMUNODEFICIENCY VIRUS
IVWQVDRMR

SEQ ID NO: 12437 - protein, 9 aa, HUMAN IMMUNODEFICIENCY VIRUS
HNKVGSLQY

SEQ ID NO: 12438 - protein, 7 aa, HUMAN IMMUNODEFICIENCY VIRUS
LPGRRGR

SEQ ID NO: 12439 - protein, 8 aa, HUMAN IMMUNODEFICIENCY VIRUS
NIRGRRVR

SEQ ID NO: 12440 - protein, 10 aa, HUMAN IMMUNODEFICIENCY VIRUS
WALELLEELK

SEQ ID NO: 12441 - protein, 8 aa, HUMAN IMMUNODEFICIENCY VIRUS
QLLFVHFR

SEQ ID NO: 12442 - protein, 8 aa, HUMAN IMMUNODEFICIENCY VIRUS
HSRIGIIR

SEQ ID NO: 12443 - protein, 8 aa, HUMAN IMMUNODEFICIENCY VIRUS
RIGITRQR

SEQ ID NO: 12444 - protein, 8 aa, HUMAN IMMUNODEFICIENCY VIRUS
IGITRQRR

SEQ ID NO: 12445 - protein, 9 aa, HUMAN IMMUNODEFICIENCY VIRUS
ALELLEELK

SEQ ID NO: 12446 - protein, 9 aa, HUMAN IMMUNODEFICIENCY VIRUS
RIGITRQRR

SEQ ID NO: 12447 - protein, 10 aa, HUMAN IMMUNODEFICIENCY VIRUS
HSRIGITRQR

SEQ ID NO: 12448 - protein, 11 aa, HUMAN IMMUNODEFICIENCY VIRUS
HSRIGITRQRR

SEQ ID NO: 12449 - protein, 8 aa, HUMAN IMMUNODEFICIENCY VIRUS
WLHGLGQY

SEQ ID NO: 12450 - protein, 8 aa, HUMAN IMMUNODEFICIENCY VIRUS
HFRIGCRH

SEQ ID NO: 12451 - protein, 8 aa, HUMAN IMMUNODEFICIENCY VIRUS
HSRIGITR

SEQ ID NO: 12452 - protein, 9 aa, HUMAN IMMUNODEFICIENCY VIRUS
FIHFRIGCR

SEQ ID NO: 12453 - protein, 10 aa, HUMAN IMMUNODEFICIENCY VIRUS
LFIHFRIGCR

SEQ ID NO: 12454 - protein, 10 aa, HUMAN IMMUNODEFICIENCY VIRUS
FIHFRIGCRH

SEQ ID NO: 12455 - protein, 10 aa, HUMAN IMMUNODEFICIENCY VIRUS
FVHFRIGCQH

SEQ ID NO: 12456 - protein, 10 aa, HUMAN IMMUNODEFICIENCY VIRUS
HFRIGCRHSR

SEQ ID NO: 12457 - protein, 11 aa, HUMAN IMMUNODEFICIENCY VIRUS
LLFIHFRIGCR

SEQ ID NO: 12458 - protein, 11 aa, HUMAN IMMUNODEFICIENCY VIRUS
LFIHFRIGCRH

SEQ ID NO: 12459 - protein, 11 aa, HUMAN IMMUNODEFICIENCY VIRUS
LFVHFRIGCQH

SEQ ID NO: 12460 - protein, 8 aa, HUMAN IMMUNODEFICIENCY VIRUS
RIGCRHSR

SEQ ID NO: 12461 - protein, 9 aa, HUMAN IMMUNODEFICIENCY VIRUS
LGQHIYNTY

SEQ ID NO: 12462 - protein, 9 aa, HUMAN IMMUNODEFICIENCY VIRUS
LGQYIYETY

SEQ ID NO: 12463 - protein, 8 aa, HUMAN IMMUNODEFICIENCY VIRUS
HFPRIWLH

SEQ ID NO: 12464 - protein, 10 aa, HUMAN IMMUNODEFICIENCY VIRUS
KSEAVRHFPR

SEQ ID NO: 12465 - protein, 11 aa, HUMAN IMMUNODEFICIENCY VIRUS
AVRHFPRIWLH

SEQ ID NO: 12466 - protein, 8 aa, HUMAN IMMUNODEFICIENCY VIRUS
ELKSEAVR

SEQ ID NO: 12467 - protein, 8 aa, HUMAN IMMUNODEFICIENCY VIRUS
AGVEAIIR

SEQ ID NO: 12468 - protein, 9 aa, HUMAN IMMUNODEFICIENCY VIRUS
ELKSEAVRH

SEQ ID NO: 12469 - protein, 9 aa, HUMAN IMMUNODEFICIENCY VIRUS
WAGVEAIIR

SEQ ID NO: 12470 - protein, 11 aa, HUMAN IMMUNODEFICIENCY VIRUS
LLEELKSEAVR

SEQ ID NO: 12471 - protein, 11 aa, HUMAN IMMUNODEFICIENCY VIRUS
DTWAGVEAIIR

SEQ ID NO: 12472 - protein, 8 aa, HUMAN IMMUNODEFICIENCY VIRUS
ELKNEAVR

SEQ ID NO: 12473 - protein, 9 aa, HUMAN IMMUNODEFICIENCY VIRUS
ELKNEAVRH

SEQ ID NO: 12474 - protein, 9 aa, HUMAN IMMUNODEFICIENCY VIRUS
LGQHIYETY

SEQ ID NO: 12475 - protein, 11 aa, HUMAN IMMUNODEFICIENCY VIRUS
LLEELKNEAVR

SEQ ID NO: 12476 - protein, 8 aa, HUMAN IMMUNODEFICIENCY VIRUS
EGVEAIIR

SEQ ID NO: 12477 - protein, 11 aa, HUMAN IMMUNODEFICIENCY VIRUS
DTWEGVEAIIR

SEQ ID NO: 12478 - protein, 8 aa, HUMAN IMMUNODEFICIENCY VIRUS
RARNGASR

SEQ ID NO: 12479 - protein, 10 aa, HUMAN IMMUNODEFICIENCY VIRUS
KNEAVRHFPR

SEQ ID NO: 12480 - protein, 8 aa, HUMAN IMMUNODEFICIENCY VIRUS
WLHGLGQH

SEQ ID NO: 12481 - protein, 8 aa, HUMAN IMMUNODEFICIENCY VIRUS
HGLGQHIY

SEQ ID NO: 12482 - protein, 10 aa, HUMAN IMMUNODEFICIENCY VIRUS
WLHGLGQHIY

SEQ ID NO: 12483 - protein, 11 aa, HUMAN IMMUNODEFICIENCY VIRUS
LFIHFRIGCQH

SEQ ID NO: 12484 - protein, 10 aa, HUMAN IMMUNODEFICIENCY VIRUS
FIHFRIGCQH

SEQ ID NO: 12485 - protein, 8 aa, HUMAN IMMUNODEFICIENCY VIRUS
HFPRPWLH

SEQ ID NO: 12486 - protein, 11 aa, HUMAN IMMUNODEFICIENCY VIRUS
AVRHFPRPWLH

SEQ ID NO: 12487 - protein, 11 aa, HUMAN IMMUNODEFICIENCY VIRUS
ILQQLLFIHFR

SEQ ID NO: 12488 - protein, 10 aa, HUMAN IMMUNODEFICIENCY VIRUS
RILQQLLFIH

SEQ ID NO: 12489 - protein, 9 aa, HUMAN IMMUNODEFICIENCY VIRUS
ILQQLLFIH

SEQ ID NO: 12490 - protein, 10 aa, HUMAN IMMUNODEFICIENCY VIRUS
EDQGPQREPY

SEQ ID NO: 12491 - protein, 10 aa, HUMAN IMMUNODEFICIENCY VIRUS
QAPEDQGPQR

SEQ ID NO: 12492 - protein, 10 aa, HUMAN IMMUNODEFICIENCY VIRUS
WTLELLEELK

SEQ ID NO: 12493 - protein, 8 aa, HUMAN IMMUNODEFICIENCY VIRUS
QGPQREPY

SEQ ID NO: 12494 - protein, 8 aa, HUMAN IMMUNODEFICIENCY VIRUS
QLLFIHFR

SEQ ID NO: 12495 - protein, 8 aa, HUMAN IMMUNODEFICIENCY VIRUS
HFRIGCQH

SEQ ID NO: 12496 - protein, 9 aa, HUMAN IMMUNODEFICIENCY VIRUS
TLELLEELK

SEQ ID NO: 12497 - protein, 10 aa, HUMAN IMMUNODEFICIENCY VIRUS
HFRIGCQHSR

SEQ ID NO: 12498 - protein, 8 aa, HUMAN IMMUNODEFICIENCY VIRUS
RIGCQHSR

SEQ ID NO: 12499 - protein, 8 aa, HUMAN IMMUNODEFICIENCY VIRUS
EAVRHFPR

SEQ ID NO: 12500 - protein, 8 aa, HUMAN IMMUNODEFICIENCY VIRUS
LVQRKQDR

SEQ ID NO: 12501 - protein, 8 aa, HUMAN IMMUNODEFICIENCY VIRUS
VTLLSSSK

SEQ ID NO: 12502 - protein, 9 aa, HUMAN IMMUNODEFICIENCY VIRUS
LVQRKQDRR

SEQ ID NO: 12503 - protein, 9 aa, HUMAN IMMUNODEFICIENCY VIRUS
LVTLLSSSK

SEQ ID NO: 12504 - protein, 11 aa, HUMAN IMMUNODEFICIENCY VIRUS
RIKEIRDDSDY

SEQ ID NO: 12505 - protein, 11 aa, HUMAN IMMUNODEFICIENCY VIRUS
RIREIRDDSDY

SEQ ID NO: 12506 - protein, 9 aa, HUMAN IMMUNODEFICIENCY VIRUS
WTIVFIEYR

SEQ ID NO: 12507 - protein, 8 aa, HUMAN IMMUNODEFICIENCY VIRUS
TIVFIEYR

SEQ ID NO: 12508 - protein, 9 aa, HUMAN IMMUNODEFICIENCY VIRUS
IDRLIDRIR

SEQ ID NO: 12509 - protein, 9 aa, HUMAN IMMUNODEFICIENCY VIRUS
RLIDRIRER

SEQ ID NO: 12510 - protein, 10 aa, HUMAN IMMUNODEFICIENCY VIRUS
KIDRLIDRIR

SEQ ID NO: 12511 - protein, 11 aa, HUMAN IMMUNODEFICIENCY VIRUS
VVWTIVFIEYR

SEQ ID NO: 12512 - protein, 8 aa, HUMAN IMMUNODEFICIENCY VIRUS
WTIVFIEY

SEQ ID NO: 12513 - protein, 8 aa, HUMAN IMMUNODEFICIENCY VIRUS
IVFIEYRK

SEQ ID NO: 12514 - protein, 10 aa, HUMAN IMMUNODEFICIENCY VIRUS
VVWTIVFIEY

SEQ ID NO: 12515 - protein, 11 aa, HUMAN IMMUNODEFICIENCY VIRUS
IVVWTIVFIEY

SEQ ID NO: 12516 - protein, 8 aa, HUMAN IMMUNODEFICIENCY VIRUS
LIDRIRER

SEQ ID NO: 12517 - protein, 8 aa, HUMAN IMMUNODEFICIENCY VIRUS
KIDRLIDR

SEQ ID NO: 12518 - protein, 9 aa, HUMAN IMMUNODEFICIENCY VIRUS
ILRQRKIDR

SEQ ID NO: 12519 - protein, 10 aa, HUMAN IMMUNODEFICIENCY VIRUS
KILRQRKIDR

SEQ ID NO: 12520 - protein, 8 aa, HUMAN IMMUNODEFICIENCY VIRUS
HMLQLTVW

SEQ ID NO: 12521 - protein, 8 aa, HUMAN IMMUNODEFICIENCY VIRUS
WFDITNWL

SEQ ID NO: 12522 - protein, 9 aa, HUMAN IMMUNODEFICIENCY VIRUS
WFDITNWLW

SEQ ID NO: 12523 - protein, 10 aa, HUMAN IMMUNODEFICIENCY VIRUS
HYCTPAGFAI

SEQ ID NO: 12524 - protein, 10 aa, HUMAN IMMUNODEFICIENCY VIRUS
IWNNMTWMEW

SEQ ID NO: 12525 - protein, 11 aa, HUMAN IMMUNODEFICIENCY VIRUS
WFDITNWLWYI

SEQ ID NO: 12526 - protein, 11 aa, HUMAN IMMUNODEFICIENCY VIRUS
SYHRLRDLLLI

SEQ ID NO: 12527 - protein, 8 aa, HUMAN IMMUNODEFICIENCY VIRUS
HYCTPAGF

SEQ ID NO: 12528 - protein, 11 aa, HUMAN IMMUNODEFICIENCY VIRUS
FYATGDIIGDI

SEQ ID NO: 12529 - protein, 8 aa, HUMAN IMMUNODEFICIENCY VIRUS
FYATGDII

SEQ ID NO: 12530 - protein, 8 aa, HUMAN IMMUNODEFICIENCY VIRUS
WMEWEREI

SEQ ID NO: 12531 - protein, 8 aa, HUMAN IMMUNODEFICIENCY VIRUS
GWEALKYL

SEQ ID NO: 12532 - protein, 8 aa, HUMAN IMMUNODEFICIENCY VIRUS
GWEGLKYL

SEQ ID NO: 12533 - protein, 9 aa, HUMAN IMMUNODEFICIENCY VIRUS
TWMEWEREI

SEQ ID NO: 12534 - protein, 10 aa, HUMAN IMMUNODEFICIENCY VIRUS
SYHRLRDLLL

SEQ ID NO: 12535 - protein, 11 aa, HUMAN IMMUNODEFICIENCY VIRUS
NMTWMEWEREI

SEQ ID NO: 12536 - protein, 11 aa, HUMAN IMMUNODEFICIENCY VIRUS
YWGQELKNSAI

SEQ ID NO: 12537 - protein, 9 aa, HUMAN IMMUNODEFICIENCY VIRUS
LYKYKVVEI

SEQ ID NO: 12538 - protein, 9 aa, HUMAN IMMUNODEFICIENCY VIRUS
SYHRLRDFI

SEQ ID NO: 12539 - protein, 10 aa, HUMAN IMMUNODEFICIENCY VIRUS
SYHRLRDFIL

SEQ ID NO: 12540 - protein, 11 aa, HUMAN IMMUNODEFICIENCY VIRUS
VMHSFNCGGEF

SEQ ID NO: 12541 - protein, 11 aa, HUMAN IMMUNODEFICIENCY VIRUS
LFSYHRLRDFI

SEQ ID NO: 12542 - protein, 11 aa, HUMAN IMMUNODEFICIENCY VIRUS
LFSYHRLRDLL

SEQ ID NO: 12543 - protein, 9 aa, HUMAN IMMUNODEFICIENCY VIRUS
SYHRLRDLL

SEQ ID NO: 12544 - protein, 10 aa, HUMAN IMMUNODEFICIENCY VIRUS
KYWWNLLQYW

SEQ ID NO: 12545 - protein, 8 aa, HUMAN IMMUNODEFICIENCY VIRUS
WWNLLQYW

SEQ ID NO: 12546 - protein, 9 aa, HUMAN IMMUNODEFICIENCY VIRUS
YWWNLLQYW

SEQ ID NO: 12547 - protein, 11 aa, HUMAN IMMUNODEFICIENCY VIRUS
KWASLWNWFDI

SEQ ID NO: 12548 - protein, 8 aa, HUMAN IMMUNODEFICIENCY VIRUS
SFNCRGEF

SEQ ID NO: 12549 - protein, 9 aa, HUMAN IMMUNODEFICIENCY VIRUS
SFNCRGEFF

SEQ ID NO: 12550 - protein, 9 aa, HUMAN IMMUNODEFICIENCY VIRUS
KWLWYIKIF

SEQ ID NO: 12551 - protein, 10 aa, HUMAN IMMUNODEFICIENCY VIRUS
KWLWYIKIFI

SEQ ID NO: 12552 - protein, 9 aa, HUMAN IMMUNODEFICIENCY VIRUS
RYLRDQQLL

SEQ ID NO: 12553 - protein, 11 aa, HUMAN IMMUNODEFICIENCY VIRUS
RYLRDQQLLGI

SEQ ID NO: 12554 - protein, 8 aa, HUMAN IMMUNODEFICIENCY VIRUS
RYLRDQQL

SEQ ID NO: 12555 - protein, 8 aa, HUMAN IMMUNODEFICIENCY VIRUS
SYHRLRDF

SEQ ID NO: 12556 - protein, 10 aa, HUMAN IMMUNODEFICIENCY VIRUS
AYDTEVHNVW

SEQ ID NO: 12557 - protein, 10 aa, HUMAN IMMUNODEFICIENCY VIRUS
LFSYHRLRDF

SEQ ID NO: 12558 - protein, 8 aa, HUMAN IMMUNODEFICIENCY VIRUS
KWLWYIKI

SEQ ID NO: 12559 - protein, 8 aa, HUMAN IMMUNODEFICIENCY VIRUS
AWDDLRSL

SEQ ID NO: 12560 - protein, 10 aa, HUMAN IMMUNODEFICIENCY VIRUS
NMVEQMHEDI

SEQ ID NO: 12561 - protein, 10 aa, HUMAN IMMUNODEFICIENCY VIRUS
AWDDLRSLCL

SEQ ID NO: 12562 - protein, 11 aa, HUMAN IMMUNODEFICIENCY VIRUS
NMVEQMHEDII

SEQ ID NO: 12563 - protein, 11 aa, HUMAN IMMUNODEFICIENCY VIRUS
AWDDLRSLCLF

SEQ ID NO: 12564 - protein, 8 aa, HUMAN IMMUNODEFICIENCY VIRUS
FYCNTSGL

SEQ ID NO: 12565 - protein, 9 aa, HUMAN IMMUNODEFICIENCY VIRUS
FFYCNTSGL

SEQ ID NO: 12566 - protein, 9 aa, HUMAN IMMUNODEFICIENCY VIRUS
FYCNTSGLF

SEQ ID NO: 12567 - protein, 10 aa, HUMAN IMMUNODEFICIENCY VIRUS
EFFYCNTSGL

SEQ ID NO: 12568 - protein, 10 aa, HUMAN IMMUNODEFICIENCY VIRUS
FFYCNTSGLF

SEQ ID NO: 12569 - protein, 11 aa, HUMAN IMMUNODEFICIENCY VIRUS
EFFYCNTSGLF

SEQ ID NO: 12570 - protein, 9 aa, HUMAN IMMUNODEFICIENCY VIRUS
VWKEATTTL

SEQ ID NO: 12571 - protein, 10 aa, HUMAN IMMUNODEFICIENCY VIRUS
VWKEATTTLF

SEQ ID NO: 12572 - protein, 10 aa, HUMAN IMMUNODEFICIENCY VIRUS
LFSYHRLRDL

SEQ ID NO: 12573 - protein, 8 aa, HUMAN IMMUNODEFICIENCY VIRUS
SYHRLRDL

SEQ ID NO: 12574 - protein, 8 aa, HUMAN IMMUNODEFICIENCY VIRUS
NWLWYIKI

SEQ ID NO: 12575 - protein, 9 aa, HUMAN IMMUNODEFICIENCY VIRUS
NWLWYIKIF

SEQ ID NO: 12576 - protein, 10 aa, HUMAN IMMUNODEFICIENCY VIRUS
KYKVVKIEPL

SEQ ID NO: 12577 - protein, 10 aa, HUMAN IMMUNODEFICIENCY VIRUS
NWLWYIKIFI

SEQ ID NO: 12578 - protein, 10 aa, HUMAN IMMUNODEFICIENCY VIRUS
GFLALAWDDL

SEQ ID NO: 12579 - protein, 11 aa, HUMAN IMMUNODEFICIENCY VIRUS
RYLKDQQLLGI

SEQ ID NO: 12580 - protein, 8 aa, HUMAN IMMUNODEFICIENCY VIRUS
KWASLWNW

SEQ ID NO: 12581 - protein, 9 aa, HUMAN IMMUNODEFICIENCY VIRUS
KWASLWNWF

SEQ ID NO: 12582 - protein, 8 aa, HUMAN IMMUNODEFICIENCY VIRUS
HYCAPAGF

SEQ ID NO: 12583 - protein, 10 aa, HUMAN IMMUNODEFICIENCY VIRUS
HYCAPAGFAI

SEQ ID NO: 12584 - protein, 11 aa, HUMAN IMMUNODEFICIENCY VIRUS
HYCAPAGFAIL

SEQ ID NO: 12585 - protein, 9 aa, HUMAN IMMUNODEFICIENCY VIRUS
QMHEDIISL

SEQ ID NO: 12586 - protein, 9 aa, HUMAN IMMUNODEFICIENCY VIRUS
LYKYKVVKI

SEQ ID NO: 12587 - protein, 9 aa, HUMAN IMMUNODEFICIENCY VIRUS
RYLKDQQLL

SEQ ID NO: 12588 - protein, 10 aa, HUMAN IMMUNODEFICIENCY VIRUS
QMHEDIISLW

SEQ ID NO: 12589 - protein, 10 aa, HUMAN IMMUNODEFICIENCY VIRUS
GYSPLSFQTL

SEQ ID NO: 12590 - protein, 8 aa, HUMAN IMMUNODEFICIENCY VIRUS
RYLKDQQL

SEQ ID NO: 12591 - protein, 10 aa, HUMAN IMMUNODEFICIENCY VIRUS
IFIMIVGGLI

SEQ ID NO: 12592 - protein, 10 aa, HUMAN IMMUNODEFICIENCY VIRUS
IMIVGGLIGL

SEQ ID NO: 12593 - protein, 8 aa, HUMAN IMMUNODEFICIENCY VIRUS
IMIVGGLI

SEQ ID NO: 12594 - protein, 9 aa, HUMAN IMMUNODEFICIENCY VIRUS
SFNCGGEFF

SEQ ID NO: 12595 - protein, 8 aa, HUMAN IMMUNODEFICIENCY VIRUS
SFNCGGEF

SEQ ID NO: 12596 - protein, 10 aa, HUMAN IMMUNODEFICIENCY VIRUS
DMRDNWRSEL

SEQ ID NO: 12597 - protein, 9 aa, HUMAN IMMUNODEFICIENCY VIRUS
TMGAASITL

SEQ ID NO: 12598 - protein, 9 aa, HUMAN IMMUNODEFICIENCY VIRUS
IFIMIVGGL

SEQ ID NO: 12599 - protein, 9 aa, HUMAN IMMUNODEFICIENCY VIRUS
WYIKIFIMI

SEQ ID NO: 12600 - protein, 10 aa, HUMAN IMMUNODEFICIENCY VIRUS
LWYIKIFIMI

SEQ ID NO: 12601 - protein, 8 aa, HUMAN IMMUNODEFICIENCY VIRUS
IWGCSGKL

SEQ ID NO: 12602 - protein, 9 aa, HUMAN IMMUNODEFICIENCY VIRUS
IWGCSGKLI

SEQ ID NO: 12603 - protein, 8 aa, HUMAN IMMUNODEFICIENCY VIRUS
LWYIKIFI

SEQ ID NO: 12604 - protein, 8 aa, HUMAN IMMUNODEFICIENCY VIRUS
VYYGVPVW

SEQ ID NO: 12605 - protein, 10 aa, HUMAN IMMUNODEFICIENCY VIRUS
LYPLASLKSL

SEQ ID NO: 12606 - protein, 11 aa, HUMAN IMMUNODEFICIENCY VIRUS
LYPLASLKSLF

SEQ ID NO: 12607 - protein, 9 aa, HUMAN IMMUNODEFICIENCY VIRUS
KYKLKHIVW

SEQ ID NO: 12608 - protein, 9 aa, HUMAN IMMUNODEFICIENCY VIRUS
GWMTSNPPI

SEQ ID NO: 12609 - protein, 8 aa, HUMAN IMMUNODEFICIENCY VIRUS
IMMQKSNF

SEQ ID NO: 12610 - protein, 8 aa, HUMAN IMMUNODEFICIENCY VIRUS
LYCVHQKI

SEQ ID NO: 12611 - protein, 10 aa, HUMAN IMMUNODEFICIENCY VIRUS
MYSPTSILDI

SEQ ID NO: 12612 - protein, 11 aa, HUMAN IMMUNODEFICIENCY VIRUS
RMYSPTSILDI

SEQ ID NO: 12613 - protein, 8 aa, HUMAN IMMUNODEFICIENCY VIRUS
RMYSPTSI

SEQ ID NO: 12614 - protein, 8 aa, HUMAN IMMUNODEFICIENCY VIRUS
MYSPTSIL

SEQ ID NO: 12615 - protein, 9 aa, HUMAN IMMUNODEFICIENCY VIRUS
RMYSPTSIL

SEQ ID NO: 12616 - protein, 8 aa, HUMAN IMMUNODEFICIENCY VIRUS
RFAVNPGL

SEQ ID NO: 12617 - protein, 8 aa, HUMAN IMMUNODEFICIENCY VIRUS
LFNTVATL

SEQ ID NO: 12618 - protein, 8 aa, HUMAN IMMUNODEFICIENCY VIRUS
WMTSNPPI

SEQ ID NO: 12619 - protein, 8 aa, HUMAN IMMUNODEFICIENCY VIRUS
NWMTDTLL

SEQ ID NO: 12620 - protein, 9 aa, HUMAN IMMUNODEFICIENCY VIRUS
KYRLKHLVW

SEQ ID NO: 12621 - protein, 9 aa, HUMAN IMMUNODEFICIENCY VIRUS
RFAVNPGLL

SEQ ID NO: 12622 - protein, 8 aa, HUMAN IMMUNODEFICIENCY VIRUS
LYCVHQRI

SEQ ID NO: 12623 - protein, 9 aa, HUMAN IMMUNODEFICIENCY VIRUS
GWMTNNPPI

SEQ ID NO: 12624 - protein, 8 aa, HUMAN IMMUNODEFICIENCY VIRUS
RFALNPGL

SEQ ID NO: 12625 - protein, 8 aa, HUMAN IMMUNODEFICIENCY VIRUS
WMTNNPPI

SEQ ID NO: 12626 - protein, 9 aa, HUMAN IMMUNODEFICIENCY VIRUS
RFALNPGLL

SEQ ID NO: 12627 - protein, 8 aa, HUMAN IMMUNODEFICIENCY VIRUS
LYNTVATL

SEQ ID NO: 12628 - protein, 11 aa, HUMAN IMMUNODEFICIENCY VIRUS
AWVKVIEEKAF

SEQ ID NO: 12629 - protein, 9 aa, HUMAN IMMUNODEFICIENCY VIRUS
AMQMLKETI

SEQ ID NO: 12630 - protein, 8 aa, HUMAN IMMUNODEFICIENCY VIRUS
IMMQRGNF

SEQ ID NO: 12631 - protein, 10 aa, HUMAN IMMUNODEFICIENCY VIRUS
DYVDRFFKTL

SEQ ID NO: 12632 - protein, 10 aa, HUMAN IMMUNODEFICIENCY VIRUS
CFNCGKEGHI

SEQ ID NO: 12633 - protein, 10 aa, HUMAN IMMUNODEFICIENCY VIRUS
CFNCGKEGHL

SEQ ID NO: 12634 - protein, 10 aa, HUMAN IMMUNODEFICIENCY VIRUS
DYVDRFYKTL

SEQ ID NO: 12635 - protein, 11 aa, HUMAN IMMUNODEFICIENCY VIRUS
AWVKVVEEKAF

SEQ ID NO: 12636 - protein, 8 aa, HUMAN IMMUNODEFICIENCY VIRUS
NYPIVQNL

SEQ ID NO: 12637 - protein, 9 aa, HUMAN IMMUNODEFICIENCY VIRUS
AMQMLKDTI

SEQ ID NO: 12638 - protein, 10 aa, HUMAN IMMUNODEFICIENCY VIRUS
PFRDYVDRFF

SEQ ID NO: 12639 - protein, 8 aa, HUMAN IMMUNODEFICIENCY VIRUS
NWMTETLL

SEQ ID NO: 12640 - protein, 11 aa, HUMAN IMMUNODEFICIENCY VIRUS
RMYSPVSILDI

SEQ ID NO: 12641 - protein, 8 aa, HUMAN IMMUNODEFICIENCY VIRUS
RMYSPVSI

SEQ ID NO: 12642 - protein, 9 aa, HUMAN IMMUNODEFICIENCY VIRUS
RMYSPVSIL

SEQ ID NO: 12643 - protein, 10 aa, HUMAN IMMUNODEFICIENCY VIRUS
MYSPVSILDI

SEQ ID NO: 12644 - protein, 8 aa, HUMAN IMMUNODEFICIENCY VIRUS
MYSPVSIL

SEQ ID NO: 12645 - protein, 10 aa, HUMAN IMMUNODEFICIENCY VIRUS
QMREPRGSDI

SEQ ID NO: 12646 - protein, 10 aa, HUMAN IMMUNODEFICIENCY VIRUS
VWASRELERF

SEQ ID NO: 12647 - protein, 10 aa, HUMAN IMMUNODEFICIENCY VIRUS
AFSPEVIPMF

SEQ ID NO: 12648 - protein, 8 aa, HUMAN IMMUNODEFICIENCY VIRUS
IYKRWIIL

SEQ ID NO: 12649 - protein, 10 aa, HUMAN IMMUNODEFICIENCY VIRUS
IYKRWIILGL

SEQ ID NO: 12650 - protein, 10 aa, HUMAN IMMUNODEFICIENCY VIRUS
RWIILGLNKI

SEQ ID NO: 12651 - protein, 9 aa, HUMAN IMMUNODEFICIENCY VIRUS
PFRDYVDRF

SEQ ID NO: 12652 - protein, 8 aa, HUMAN IMMUNODEFICIENCY VIRUS
PMTYKGAF

SEQ ID NO: 12653 - protein, 8 aa, HUMAN IMMUNODEFICIENCY VIRUS
TYKGAFDL

SEQ ID NO: 12654 - protein, 10 aa, HUMAN IMMUNODEFICIENCY VIRUS
PMTYKGAFDL

SEQ ID NO: 12655 - protein, 8 aa, HUMAN IMMUNODEFICIENCY VIRUS
VYHTQGFF

SEQ ID NO: 12656 - protein, 9 aa, HUMAN IMMUNODEFICIENCY VIRUS
LWVYHTQGF

SEQ ID NO: 12657 - protein, 10 aa, HUMAN IMMUNODEFICIENCY VIRUS
LWVYHTQGFF

SEQ ID NO: 12658 - protein, 10 aa, HUMAN IMMUNODEFICIENCY VIRUS
NYTPGPGTRF

SEQ ID NO: 12659 - protein, 11 aa, HUMAN IMMUNODEFICIENCY VIRUS
VYHTQGFFPDW

SEQ ID NO: 12660 - protein, 10 aa, HUMAN IMMUNODEFICIENCY VIRUS
RFPLTFGWCF

SEQ ID NO: 12661 - protein, 9 aa, HUMAN IMMUNODEFICIENCY VIRUS
IYSKKRQEI

SEQ ID NO: 12662 - protein, 10 aa, HUMAN IMMUNODEFICIENCY VIRUS
IYSKKRQEIL

SEQ ID NO: 12663 - protein, 8 aa, HUMAN IMMUNODEFICIENCY VIRUS
AFDLSFFL

SEQ ID NO: 12664 - protein, 11 aa, HUMAN IMMUNODEFICIENCY VIRUS
DWQNYTPGPGI

SEQ ID NO: 12665 - protein, 8 aa, HUMAN IMMUNODEFICIENCY VIRUS
RFPLTFGW

SEQ ID NO: 12666 - protein, 8 aa, HUMAN IMMUNODEFICIENCY VIRUS
NYTPGPGI

SEQ ID NO: 12667 - protein, 10 aa, HUMAN IMMUNODEFICIENCY VIRUS
KWSKSSIVGW

SEQ ID NO: 12668 - protein, 10 aa, HUMAN IMMUNODEFICIENCY VIRUS
RYPLTFGWCF

SEQ ID NO: 12669 - protein, 8 aa, HUMAN IMMUNODEFICIENCY VIRUS
VYHTQGYF

SEQ ID NO: 12670 - protein, 10 aa, HUMAN IMMUNODEFICIENCY VIRUS
LWVYHTQGYF

SEQ ID NO: 12671 - protein, 11 aa, HUMAN IMMUNODEFICIENCY VIRUS
VYHTQGYFPDW

SEQ ID NO: 12672 - protein, 10 aa, HUMAN IMMUNODEFICIENCY VIRUS
SFFLKEKGGL

SEQ ID NO: 12673 - protein, 9 aa, HUMAN IMMUNODEFICIENCY VIRUS
FFLKEKGGL

SEQ ID NO: 12674 - protein, 8 aa, HUMAN IMMUNODEFICIENCY VIRUS
RYPLTFGW

SEQ ID NO: 12675 - protein, 9 aa, HUMAN IMMUNODEFICIENCY VIRUS
HFLKEKGGL

SEQ ID NO: 12676 - protein, 8 aa, HUMAN IMMUNODEFICIENCY VIRUS
TFGWCFKL

SEQ ID NO: 12677 - protein, 10 aa, HUMAN IMMUNODEFICIENCY VIRUS
GFPVRPQVPL

SEQ ID NO: 12678 - protein, 10 aa, HUMAN IMMUNODEFICIENCY VIRUS
AFPQGEAREF

SEQ ID NO: 12679 - protein, 10 aa, HUMAN IMMUNODEFICIENCY VIRUS
NMLTQLGCTL

SEQ ID NO: 12680 - protein, 10 aa, HUMAN IMMUNODEFICIENCY VIRUS
TWETWWTDYW

SEQ ID NO: 12681 - protein, 11 aa, HUMAN IMMUNODEFICIENCY VIRUS
TWWTDYWQATW

SEQ ID NO: 12682 - protein, 10 aa, HUMAN IMMUNODEFICIENCY VIRUS
CWWAGIQQEF

SEQ ID NO: 12683 - protein, 8 aa, HUMAN IMMUNODEFICIENCY VIRUS
IWGKIPKF

SEQ ID NO: 12684 - protein, 9 aa, HUMAN IMMUNODEFICIENCY VIRUS
WYQLETEPI

SEQ ID NO: 12685 - protein, 9 aa, HUMAN IMMUNODEFICIENCY VIRUS
WWAGIQQEF

SEQ ID NO: 12686 - protein, 10 aa, HUMAN IMMUNODEFICIENCY VIRUS
IYPGIKVKQL

SEQ ID NO: 12687 - protein, 10 aa, HUMAN IMMUNODEFICIENCY VIRUS
LWYQLETEPI

SEQ ID NO: 12688 - protein, 11 aa, HUMAN IMMUNODEFICIENCY VIRUS
WWAGIQQEFGI

SEQ ID NO: 12689 - protein, 9 aa, HUMAN IMMUNODEFICIENCY VIRUS
QYDQIPIEI

SEQ ID NO: 12690 - protein, 9 aa, HUMAN IMMUNODEFICIENCY VIRUS
KWTVQPIVL

SEQ ID NO: 12691 - protein, 11 aa, HUMAN IMMUNODEFICIENCY VIRUS
LWQRPLVTVKI

SEQ ID NO: 12692 - protein, 11 aa, HUMAN IMMUNODEFICIENCY VIRUS
TWWTEYWQATW

SEQ ID NO: 12693 - protein, 10 aa, HUMAN IMMUNODEFICIENCY VIRUS
SFSFPQITLW

SEQ ID NO: 12694 - protein, 9 aa, HUMAN IMMUNODEFICIENCY VIRUS
SFSFPQITL

SEQ ID NO: 12695 - protein, 9 aa, HUMAN IMMUNODEFICIENCY VIRUS
WYQLEKDPI

SEQ ID NO: 12696 - protein, 9 aa, HUMAN IMMUNODEFICIENCY VIRUS
YYRDSRDPL

SEQ ID NO: 12697 - protein, 10 aa, HUMAN IMMUNODEFICIENCY VIRUS
WWTDYWQATW

SEQ ID NO: 12698 - protein, 10 aa, HUMAN IMMUNODEFICIENCY VIRUS
LWYQLEKDPI

SEQ ID NO: 12699 - protein, 10 aa, HUMAN IMMUNODEFICIENCY VIRUS
VYYRDSRDPL

SEQ ID NO: 12700 - protein, 10 aa, HUMAN IMMUNODEFICIENCY VIRUS
YYRDSRDPLW

SEQ ID NO: 12701 - protein, 11 aa, HUMAN IMMUNODEFICIENCY VIRUS
LWQRPLVTIKI

SEQ ID NO: 12702 - protein, 11 aa, HUMAN IMMUNODEFICIENCY VIRUS
PFRKQNPDIVI

SEQ ID NO: 12703 - protein, 11 aa, HUMAN IMMUNODEFICIENCY VIRUS
WWTDYWQATWI

SEQ ID NO: 12704 - protein, 11 aa, HUMAN IMMUNODEFICIENCY VIRUS
GYSAGERIVDI

SEQ ID NO: 12705 - protein, 11 aa, HUMAN IMMUNODEFICIENCY VIRUS
VYYRDSRDPLW

SEQ ID NO: 12706 - protein, 8 aa, HUMAN IMMUNODEFICIENCY VIRUS
FFREDLAF

SEQ ID NO: 12707 - protein, 10 aa, HUMAN IMMUNODEFICIENCY VIRUS
IYPGIKVRQL

SEQ ID NO: 12708 - protein, 9 aa, HUMAN IMMUNODEFICIENCY VIRUS
PFRKQNPDI

SEQ ID NO: 12709 - protein, 10 aa, HUMAN IMMUNODEFICIENCY VIRUS
RWKPKMIGGI

SEQ ID NO: 12710 - protein, 10 aa, HUMAN IMMUNODEFICIENCY VIRUS
IWGKTPKFKL

SEQ ID NO: 12711 - protein, 10 aa, HUMAN IMMUNODEFICIENCY VIRUS
YFSVPLDKDF

SEQ ID NO: 12712 - protein, 9 aa, HUMAN IMMUNODEFICIENCY VIRUS
LWKGPAKLL

SEQ ID NO: 12713 - protein, 10 aa, HUMAN IMMUNODEFICIENCY VIRUS
NMLTQIGCTL

SEQ ID NO: 12714 - protein, 10 aa, HUMAN IMMUNODEFICIENCY VIRUS
IYAGIKVKQL

SEQ ID NO: 12715 - protein, 10 aa, HUMAN IMMUNODEFICIENCY VIRUS
LWKGPAKLLW

SEQ ID NO: 12716 - protein, 11 aa, HUMAN IMMUNODEFICIENCY VIRUS
AYFSVPLDKDF

SEQ ID NO: 12717 - protein, 11 aa, HUMAN IMMUNODEFICIENCY VIRUS
AMASDFNLPPI

SEQ ID NO: 12718 - protein, 8 aa, HUMAN IMMUNODEFICIENCY VIRUS
LWKGPAKL

SEQ ID NO: 12719 - protein, 11 aa, HUMAN IMMUNODEFICIENCY VIRUS
DYWQATWIPEW

SEQ ID NO: 12720 - protein, 8 aa, HUMAN IMMUNODEFICIENCY VIRUS
DYWQATWI

SEQ ID NO: 12721 - protein, 11 aa, HUMAN IMMUNODEFICIENCY VIRUS
KFKLPIQKETW

SEQ ID NO: 12722 - protein, 10 aa, HUMAN IMMUNODEFICIENCY VIRUS
CWWAGIKQEF

SEQ ID NO: 12723 - protein, 9 aa, HUMAN IMMUNODEFICIENCY VIRUS
LWQRPLVTI

SEQ ID NO: 12724 - protein, 9 aa, HUMAN IMMUNODEFICIENCY VIRUS
WWAGIKQEF

SEQ ID NO: 12725 - protein, 11 aa, HUMAN IMMUNODEFICIENCY VIRUS
WWAGIKQEFGI

SEQ ID NO: 12726 - protein, 8 aa, HUMAN IMMUNODEFICIENCY VIRUS
NFPQITLW

SEQ ID NO: 12727 - protein, 9 aa, HUMAN IMMUNODEFICIENCY VIRUS
AWVPAHKGI

SEQ ID NO: 12728 - protein, 8 aa, HUMAN IMMUNODEFICIENCY VIRUS
SFPQITLW

SEQ ID NO: 12729 - protein, 10 aa, HUMAN IMMUNODEFICIENCY VIRUS
WWTEYWQATW

SEQ ID NO: 12730 - protein, 11 aa, HUMAN IMMUNODEFICIENCY VIRUS
WWTEYWQATWI

SEQ ID NO: 12731 - protein, 9 aa, HUMAN IMMUNODEFICIENCY VIRUS
PYNTPIFAI

SEQ ID NO: 12732 - protein, 10 aa, HUMAN IMMUNODEFICIENCY VIRUS
YFLLKLAGRW

SEQ ID NO: 12733 - protein, 11 aa, HUMAN IMMUNODEFICIENCY VIRUS
AYFLLKLAGRW

SEQ ID NO: 12734 - protein, 11 aa, HUMAN IMMUNODEFICIENCY VIRUS
KFRLPIQKETW

SEQ ID NO: 12735 - protein, 9 aa, HUMAN IMMUNODEFICIENCY VIRUS
QYDQILIEI

SEQ ID NO: 12736 - protein, 10 aa, HUMAN IMMUNODEFICIENCY VIRUS
NWASQIYAGI

SEQ ID NO: 12737 - protein, 9 aa, HUMAN IMMUNODEFICIENCY VIRUS
KWTVQPIQL

SEQ ID NO: 12738 - protein, 10 aa, HUMAN IMMUNODEFICIENCY VIRUS
NWASQIYPGI

SEQ ID NO: 12739 - protein, 10 aa, HUMAN IMMUNODEFICIENCY VIRUS
IWGKTPKFRL

SEQ ID NO: 12740 - protein, 9 aa, HUMAN IMMUNODEFICIENCY VIRUS
WYQLEKEPI

SEQ ID NO: 12741 - protein, 10 aa, HUMAN IMMUNODEFICIENCY VIRUS
VYYDPSKDLI

SEQ ID NO: 12742 - protein, 10 aa, HUMAN IMMUNODEFICIENCY VIRUS
LWYQLEKEPI

SEQ ID NO: 12743 - protein, 10 aa, HUMAN IMMUNODEFICIENCY VIRUS
YFILKLAGRW

SEQ ID NO: 12744 - protein, 11 aa, HUMAN IMMUNODEFICIENCY VIRUS
AYFILKLAGRW

SEQ ID NO: 12745 - protein, 11 aa, HUMAN IMMUNODEFICIENCY VIRUS
EMEKEGKISKI

SEQ ID NO: 12746 - protein, 11 aa, HUMAN IMMUNODEFICIENCY VIRUS
EYWQATWIPEW

SEQ ID NO: 12747 - protein, 9 aa, HUMAN IMMUNODEFICIENCY VIRUS
YYRDSRDPI

SEQ ID NO: 12748 - protein, 10 aa, HUMAN IMMUNODEFICIENCY VIRUS
VYYRDSRDPI

SEQ ID NO: 12749 - protein, 10 aa, HUMAN IMMUNODEFICIENCY VIRUS
YYRDSRDPIW

SEQ ID NO: 12750 - protein, 11 aa, HUMAN IMMUNODEFICIENCY VIRUS
VYYRDSRDPIW

SEQ ID NO: 12751 - protein, 9 aa, HUMAN IMMUNODEFICIENCY VIRUS
YYDPSKDLI

SEQ ID NO: 12752 - protein, 9 aa, HUMAN IMMUNODEFICIENCY VIRUS
IWKGPAKLL

SEQ ID NO: 12753 - protein, 10 aa, HUMAN IMMUNODEFICIENCY VIRUS
IWKGPAKLLW

SEQ ID NO: 12754 - protein, 8 aa, HUMAN IMMUNODEFICIENCY VIRUS
IWKGPAKL

SEQ ID NO: 12755 - protein, 8 aa, HUMAN IMMUNODEFICIENCY VIRUS
EYWQATWI

SEQ ID NO: 12756 - protein, 9 aa, HUMAN IMMUNODEFICIENCY VIRUS
PYNTPVFAI

SEQ ID NO: 12757 - protein, 9 aa, HUMAN IMMUNODEFICIENCY VIRUS
SWVPAHKGI

SEQ ID NO: 12758 - protein, 10 aa, HUMAN IMMUNODEFICIENCY VIRUS
KYTAFTIPSI

SEQ ID NO: 12759 - protein, 9 aa, HUMAN IMMUNODEFICIENCY VIRUS
IFQSSMTKI

SEQ ID NO: 12760 - protein, 10 aa, HUMAN IMMUNODEFICIENCY VIRUS
IFQSSMTKIL

SEQ ID NO: 12761 - protein, 9 aa, HUMAN IMMUNODEFICIENCY VIRUS
VYYDPSKDL

SEQ ID NO: 12762 - protein, 9 aa, HUMAN IMMUNODEFICIENCY VIRUS
IYQEPFKNL

SEQ ID NO: 12763 - protein, 11 aa, HUMAN IMMUNODEFICIENCY VIRUS
GYSAGERIIDI

SEQ ID NO: 12764 - protein, 8 aa, HUMAN IMMUNODEFICIENCY VIRUS
FFRENLAF

SEQ ID NO: 12765 - protein, 9 aa, HUMAN IMMUNODEFICIENCY VIRUS
GYSAGERII

SEQ ID NO: 12766 - protein, 11 aa, HUMAN IMMUNODEFICIENCY VIRUS
GFIKVRQYDQI

SEQ ID NO: 12767 - protein, 11 aa, HUMAN IMMUNODEFICIENCY VIRUS
NWRAMASDFNL

SEQ ID NO: 12768 - protein, 8 aa, HUMAN IMMUNODEFICIENCY VIRUS
EMEKEGKI

SEQ ID NO: 12769 - protein, 8 aa, HUMAN IMMUNODEFICIENCY VIRUS
DFRKYTAF

SEQ ID NO: 12770 - protein, 9 aa, HUMAN IMMUNODEFICIENCY VIRUS
TYQIYQEPF

SEQ ID NO: 12771 - protein, 10 aa, HUMAN IMMUNODEFICIENCY VIRUS
KWKPKMIGGI

SEQ ID NO: 12772 - protein, 10 aa, HUMAN IMMUNODEFICIENCY VIRUS
DFRKYTAFTI

SEQ ID NO: 12773 - protein, 11 aa, HUMAN IMMUNODEFICIENCY VIRUS
QWTYQIYQEPF

SEQ ID NO: 12774 - protein, 8 aa, HUMAN IMMUNODEFICIENCY VIRUS
YYDPSKDL

SEQ ID NO: 12775 - protein, 9 aa, HUMAN IMMUNODEFICIENCY VIRUS
SMTKILEPF

SEQ ID NO: 12776 - protein, 9 aa, HUMAN IMMUNODEFICIENCY VIRUS
NWRAMASDF

SEQ ID NO: 12777 - protein, 8 aa, HUMAN IMMUNODEFICIENCY VIRUS
AMASDFNL

SEQ ID NO: 12778 - protein, 8 aa, HUMAN IMMUNODEFICIENCY VIRUS
IWGKTPKF

SEQ ID NO: 12779 - protein, 10 aa, HUMAN IMMUNODEFICIENCY VIRUS
EWEFVNTPPL

SEQ ID NO: 12780 - protein, 10 aa, HUMAN IMMUNODEFICIENCY VIRUS
GMDGPKVKQW

SEQ ID NO: 12781 - protein, 8 aa, HUMAN IMMUNODEFICIENCY VIRUS
TWIPEWEF

SEQ ID NO: 12782 - protein, 10 aa, HUMAN IMMUNODEFICIENCY VIRUS
YWQATWIPEW

SEQ ID NO: 12783 - protein, 9 aa, HUMAN IMMUNODEFICIENCY VIRUS
SMNKELKKI

SEQ ID NO: 12784 - protein, 10 aa, HUMAN IMMUNODEFICIENCY VIRUS
SMNKELKKII

SEQ ID NO: 12785 - protein, 8 aa, HUMAN IMMUNODEFICIENCY VIRUS
EFVNTPPL

SEQ ID NO: 12786 - protein, 8 aa, HUMAN IMMUNODEFICIENCY VIRUS
GYIEAEVI

SEQ ID NO: 12787 - protein, 10 aa, HUMAN IMMUNODEFICIENCY VIRUS
SWTVNDIQKL

SEQ ID NO: 12788 - protein, 11 aa, HUMAN IMMUNODEFICIENCY VIRUS
EFVNTPPLVKL

SEQ ID NO: 12789 - protein, 9 aa, HUMAN IMMUNODEFICIENCY VIRUS
QWPLTEEKI

SEQ ID NO: 12790 - protein, 9 aa, HUMAN IMMUNODEFICIENCY VIRUS
DFWEVQLGI

SEQ ID NO: 12791 - protein, 8 aa, HUMAN IMMUNODEFICIENCY VIRUS
FWEVQLGI

SEQ ID NO: 12792 - protein, 8 aa, HUMAN IMMUNODEFICIENCY VIRUS
GYSAGERI

SEQ ID NO: 12793 - protein, 9 aa, HUMAN IMMUNODEFICIENCY VIRUS
LYVGSDLEI

SEQ ID NO: 12794 - protein, 8 aa, HUMAN IMMUNODEFICIENCY VIRUS
KWRKLVDF

SEQ ID NO: 12795 - protein, 8 aa, HUMAN IMMUNODEFICIENCY VIRUS
GWKGSPAI

SEQ ID NO: 12796 - protein, 9 aa, HUMAN IMMUNODEFICIENCY VIRUS
GWKGSPAIF

SEQ ID NO: 12797 - protein, 9 aa, HUMAN IMMUNODEFICIENCY VIRUS
IWQLDCTHL

SEQ ID NO: 12798 - protein, 10 aa, HUMAN IMMUNODEFICIENCY VIRUS
LWKGEGAVVI

SEQ ID NO: 12799 - protein, 11 aa, HUMAN IMMUNODEFICIENCY VIRUS
KWRKLVDFREL

SEQ ID NO: 12800 - protein, 8 aa, HUMAN IMMUNODEFICIENCY VIRUS
NFKRKGGI

SEQ ID NO: 12801 - protein, 9 aa, HUMAN IMMUNODEFICIENCY VIRUS
GYELHPDKW

SEQ ID NO: 12802 - protein, 9 aa, HUMAN IMMUNODEFICIENCY VIRUS
QMAVFIHNF

SEQ ID NO: 12803 - protein, 11 aa, HUMAN IMMUNODEFICIENCY VIRUS
WMGYELHPDKW

SEQ ID NO: 12804 - protein, 8 aa, HUMAN IMMUNODEFICIENCY VIRUS
IYQYMDDL

SEQ ID NO: 12805 - protein, 11 aa, HUMAN IMMUNODEFICIENCY VIRUS
YMDDLYVGSDL

SEQ ID NO: 12806 - protein, 9 aa, HUMAN IMMUNODEFICIENCY VIRUS
KMIGGIGGF

SEQ ID NO: 12807 - protein, 10 aa, HUMAN IMMUNODEFICIENCY VIRUS
KMIGGIGGFI

SEQ ID NO: 12808 - protein, 9 aa, HUMAN IMMUNODEFICIENCY VIRUS
QYNVLPQGW

SEQ ID NO: 12809 - protein, 11 aa, HUMAN IMMUNODEFICIENCY VIRUS
RYQYNVLPQGW

SEQ ID NO: 12810 - protein, 9 aa, HUMAN IMMUNODEFICIENCY VIRUS
PFLWMGYEL

SEQ ID NO: 12811 - protein, 9 aa, HUMAN IMMUNODEFICIENCY VIRUS
RWRERQRQI

SEQ ID NO: 12812 - protein, 9 aa, HUMAN IMMUNODEFICIENCY VIRUS
RWRARQRQI

SEQ ID NO: 12813 - protein, 8 aa, HUMAN IMMUNODEFICIENCY VIRUS
CYCKKCCF

SEQ ID NO: 12814 - protein, 8 aa, HUMAN IMMUNODEFICIENCY VIRUS
CFHCQVCF

SEQ ID NO: 12815 - protein, 9 aa, HUMAN IMMUNODEFICIENCY VIRUS
CFLNKGLGI

SEQ ID NO: 12816 - protein, 8 aa, HUMAN IMMUNODEFICIENCY VIRUS
RWQVLIVW

SEQ ID NO: 12817 - protein, 10 aa, HUMAN IMMUNODEFICIENCY VIRUS
RYSTQVDPGL

SEQ ID NO: 12818 - protein, 11 aa, HUMAN IMMUNODEFICIENCY VIRUS
CFSDSAIRKAI

SEQ ID NO: 12819 - protein, 8 aa, HUMAN IMMUNODEFICIENCY VIRUS
QYLALKAL

SEQ ID NO: 12820 - protein, 8 aa, HUMAN IMMUNODEFICIENCY VIRUS
QYLALAAL

SEQ ID NO: 12821 - protein, 10 aa, HUMAN IMMUNODEFICIENCY VIRUS
RMKIRTWNSL

SEQ ID NO: 12822 - protein, 11 aa, HUMAN IMMUNODEFICIENCY VIRUS
YWGLQTGERDW

SEQ ID NO: 12823 - protein, 11 aa, HUMAN IMMUNODEFICIENCY VIRUS
CFSESAIRKAI

SEQ ID NO: 12824 - protein, 11 aa, HUMAN IMMUNODEFICIENCY VIRUS
CFSESAIRNAI

SEQ ID NO: 12825 - protein, 9 aa, HUMAN IMMUNODEFICIENCY VIRUS
VWQVDRMKI

SEQ ID NO: 12826 - protein, 8 aa, HUMAN IMMUNODEFICIENCY VIRUS
HMHYFDCF

SEQ ID NO: 12827 - protein, 10 aa, HUMAN IMMUNODEFICIENCY VIRUS
RMRIRTWKSL

SEQ ID NO: 12828 - protein, 10 aa, HUMAN IMMUNODEFICIENCY VIRUS
RMRIRTWNSL

SEQ ID NO: 12829 - protein, 10 aa, HUMAN IMMUNODEFICIENCY VIRUS
DWHLGQGVSI

SEQ ID NO: 12830 - protein, 11 aa, HUMAN IMMUNODEFICIENCY VIRUS
YYFDCFSESAI

SEQ ID NO: 12831 - protein, 10 aa, HUMAN IMMUNODEFICIENCY VIRUS
DWHLGHGVSI

SEQ ID NO: 12832 - protein, 11 aa, HUMAN IMMUNODEFICIENCY VIRUS
YWGLHTGERDW

SEQ ID NO: 12833 - protein, 9 aa, HUMAN IMMUNODEFICIENCY VIRUS
QYLALTALI

SEQ ID NO: 12834 - protein, 10 aa, HUMAN IMMUNODEFICIENCY VIRUS
YFDCFSESAI

SEQ ID NO: 12835 - protein, 8 aa, HUMAN IMMUNODEFICIENCY VIRUS
QYLALTAL

SEQ ID NO: 12836 - protein, 8 aa, HUMAN IMMUNODEFICIENCY VIRUS
RWQVMIVW

SEQ ID NO: 12837 - protein, 9 aa, HUMAN IMMUNODEFICIENCY VIRUS
VWQVDRMRI

SEQ ID NO: 12838 - protein, 10 aa, HUMAN IMMUNODEFICIENCY VIRUS
HFPRIWLHSL

SEQ ID NO: 12839 - protein, 11 aa, HUMAN IMMUNODEFICIENCY VIRUS
HFRIGCRHSRI

SEQ ID NO: 12840 - protein, 10 aa, HUMAN IMMUNODEFICIENCY VIRUS
PWLHGLGQHI

SEQ ID NO: 12841 - protein, 11 aa, HUMAN IMMUNODEFICIENCY VIRUS
QYIYETYGDTW

SEQ ID NO: 12842 - protein, 11 aa, HUMAN IMMUNODEFICIENCY VIRUS
TWEGVEAIIRI

SEQ ID NO: 12843 - protein, 11 aa, HUMAN IMMUNODEFICIENCY VIRUS
TWAGVEAIIRI

SEQ ID NO: 12844 - protein, 8 aa, HUMAN IMMUNODEFICIENCY VIRUS
TWAGVEAI

SEQ ID NO: 12845 - protein, 9 aa, HUMAN IMMUNODEFICIENCY VIRUS
TWAGVEAII

SEQ ID NO: 12846 - protein, 9 aa, HUMAN IMMUNODEFICIENCY VIRUS
IYNTYGDTW

SEQ ID NO: 12847 - protein, 9 aa, HUMAN IMMUNODEFICIENCY VIRUS
TWEGVEAII

SEQ ID NO: 12848 - protein, 8 aa, HUMAN IMMUNODEFICIENCY VIRUS
TWEGVEAI

SEQ ID NO: 12849 - protein, 10 aa, HUMAN IMMUNODEFICIENCY VIRUS
HFPRPWLHGL

SEQ ID NO: 12850 - protein, 9 aa, HUMAN IMMUNODEFICIENCY VIRUS
PYNEWTLEL

SEQ ID NO: 12851 - protein, 10 aa, HUMAN IMMUNODEFICIENCY VIRUS
PYNEWTLELL

SEQ ID NO: 12852 - protein, 9 aa, HUMAN IMMUNODEFICIENCY VIRUS
IYETYGDTW

SEQ ID NO: 12853 - protein, 10 aa, HUMAN IMMUNODEFICIENCY VIRUS
EWTLELLEEL

SEQ ID NO: 12854 - protein, 11 aa, HUMAN IMMUNODEFICIENCY VIRUS
HFRIGCQHSRI

SEQ ID NO: 12855 - protein, 9 aa, HUMAN IMMUNODEFICIENCY VIRUS
NYELAVGAL

SEQ ID NO: 12856 - protein, 10 aa, HUMAN IMMUNODEFICIENCY VIRUS
NYELAVGALI

SEQ ID NO: 12857 - protein, 9 aa, HUMAN IMMUNODEFICIENCY VIRUS
DYKLGVGAL

SEQ ID NO: 12858 - protein, 10 aa, HUMAN IMMUNODEFICIENCY VIRUS
DYKLGVGALI

SEQ ID NO: 12859 - protein, 9 aa, HUMAN IMMUNODEFICIENCY VIRUS
DYRLGVGAL

SEQ ID NO: 12860 - protein, 10 aa, HUMAN IMMUNODEFICIENCY VIRUS
DYRLGVGALI

SEQ ID NO: 12861 - protein, 8 aa, HUMAN IMMUNODEFICIENCY VIRUS
EMGHHAPW

SEQ ID NO: 12862 - protein, 8 aa, HUMAN IMMUNODEFICIENCY VIRUS
VFIEYRKI

SEQ ID NO: 12863 - protein, 11 aa, HUMAN IMMUNODEFICIENCY VIRUS
EYRKILRQRKI

SEQ ID NO: 12864 - protein, 15 aa, HUMAN IMMUNODEFICIENCY VIRUS
KPVVSTQLLLNGSLA

SEQ ID NO: 12865 - protein, 15 aa, HUMAN IMMUNODEFICIENCY VIRUS
IKPVVSTQLLLNGSL

SEQ ID NO: 12866 - protein, 15 aa, HUMAN IMMUNODEFICIENCY VIRUS
LLQLTVWGIKQLQAR

SEQ ID NO: 12867 - protein, 15 aa, HUMAN IMMUNODEFICIENCY VIRUS
ARQLLSGIVQQQSNL

SEQ ID NO: 12868 - protein, 15 aa, HUMAN IMMUNODEFICIENCY VIRUS
HNVWATHACVPTDPN

SEQ ID NO: 12869 - protein, 15 aa, HUMAN IMMUNODEFICIENCY VIRUS
LGFLGAAGSTMGAAS

SEQ ID NO: 12870 - protein, 15 aa, HUMAN IMMUNODEFICIENCY VIRUS
VNRVRQGYSPLSFQT

SEQ ID NO: 12871 - protein, 15 aa, HUMAN IMMUNODEFICIENCY VIRUS
STQLLLNGSLAEEEV

SEQ ID NO: 12872 - protein, 15 aa, HUMAN IMMUNODEFICIENCY VIRUS
KPCVKLTPLCVTLNC

SEQ ID NO: 12873 - protein, 15 aa, HUMAN IMMUNODEFICIENCY VIRUS
NNLLRAIEAQQHLLQ

SEQ ID NO: 12874 - protein, 15 aa, HUMAN IMMUNODEFICIENCY VIRUS
CKNVSTVQCTHGIKP

SEQ ID NO: 12875 - protein, 15 aa, HUMAN IMMUNODEFICIENCY VIRUS
QQLLGIWGCSGKLIC

SEQ ID NO: 12876 - protein, 15 aa, HUMAN IMMUNODEFICIENCY VIRUS
IISLWDQSLKPCVKL

SEQ ID NO: 12877 - protein, 15 aa, HUMAN IMMUNODEFICIENCY VIRUS
AVFLGFLGAAGSTMG

SEQ ID NO: 12878 - protein, 15 aa, HUMAN IMMUNODEFICIENCY VIRUS
VHNVWATHACVPTDP

SEQ ID NO: 12879 - protein, 15 aa, HUMAN IMMUNODEFICIENCY VIRUS
LTVWGIKQLQARVLA

SEQ ID NO: 12880 - protein, 15 aa, HUMAN IMMUNODEFICIENCY VIRUS
TNWLWYIKIFIMIVG

SEQ ID NO: 12881 - protein, 15 aa, HUMAN IMMUNODEFICIENCY VIRUS
TTLFCASDAKAYDTE

SEQ ID NO: 12882 - protein, 15 aa, HUMAN IMMUNODEFICIENCY VIRUS
FIMIVGGLIGLRIVF

SEQ ID NO: 12883 - protein, 15 aa, HUMAN IMMUNODEFICIENCY VIRUS
YIKIFIMIVGGLIGL

SEQ ID NO: 12884 - protein, 15 aa, HUMAN IMMUNODEFICIENCY VIRUS
WVTVYYGVPVWKEAT

SEQ ID NO: 12885 - protein, 15 aa, HUMAN IMMUNODEFICIENCY VIRUS
VWGIKQLQARVLAVE

SEQ ID NO: 12886 - protein, 15 aa, HUMAN IMMUNODEFICIENCY VIRUS
LWYIKIFIMIVGGLI

SEQ ID NO: 12887 - protein, 15 aa, HUMAN IMMUNODEFICIENCY VIRUS
GSTMGAASITLTVQA

SEQ ID NO: 12888 - protein, 15 aa, HUMAN IMMUNODEFICIENCY VIRUS
WLWYIKIFIMIVGGL

SEQ ID NO: 12889 - protein, 15 aa, HUMAN IMMUNODEFICIENCY VIRUS
SSNITGLLLTRDGGK

SEQ ID NO: 12890 - protein, 15 aa, HUMAN IMMUNODEFICIENCY VIRUS
FEPIPIHYCAPAGFA

SEQ ID NO: 12891 - protein, 15 aa, HUMAN IMMUNODEFICIENCY VIRUS
IFIMIVGGLIGLRIV

SEQ ID NO: 12892 - protein, 15 aa, HUMAN IMMUNODEFICIENCY VIRUS
TLTVQARQLLSGIVQ

SEQ ID NO: 12893 - protein, 15 aa, HUMAN IMMUNODEFICIENCY VIRUS
KVSFEPIPIHYCAPA

SEQ ID NO: 12894 - protein, 15 aa, HUMAN IMMUNODEFICIENCY VIRUS
WDDLRSLCLFSYHRL

SEQ ID NO: 12895 - protein, 15 aa, HUMAN IMMUNODEFICIENCY VIRUS
NFNMWKNNMVEQMHE

SEQ ID NO: 12896 - protein, 15 aa, HUMAN IMMUNODEFICIENCY VIRUS
DTEVHNVWATHACVP

SEQ ID NO: 12897 - protein, 15 aa, HUMAN IMMUNODEFICIENCY VIRUS
FNMWKNNMVEQMHED

SEQ ID NO: 12898 - protein, 15 aa, HUMAN IMMUNODEFICIENCY VIRUS
VTVYYGVPVWKEATT

SEQ ID NO: 12899 - protein, 15 aa, HUMAN IMMUNODEFICIENCY VIRUS
QQHLLQLTVWGIKQL

SEQ ID NO: 12900 - protein, 15 aa, HUMAN IMMUNODEFICIENCY VIRUS
VVKIEPLGVAPTKAK

SEQ ID NO: 12901 - protein, 15 aa, HUMAN IMMUNODEFICIENCY VIRUS
THGIKPVVSTQLLLN

SEQ ID NO: 12902 - protein, 15 aa, HUMAN IMMUNODEFICIENCY VIRUS
IKQLQARVLAVERYL

SEQ ID NO: 12903 - protein, 15 aa, HUMAN IMMUNODEFICIENCY VIRUS
ALAWDDLRSLCLFSY

SEQ ID NO: 12904 - protein, 15 aa, HUMAN IMMUNODEFICIENCY VIRUS
SRPIINIHTPHREKR

SEQ ID NO: 12905 - protein, 15 aa, HUMAN IMMUNODEFICIENCY VIRUS
RPIINIHTPHREKRA

SEQ ID NO: 12906 - protein, 15 aa, HUMAN IMMUNODEFICIENCY VIRUS
TSVITQACPKVSFEP

SEQ ID NO: 12907 - protein, 15 aa, HUMAN IMMUNODEFICIENCY VIRUS
LSGIVQQQSNLLRAI

SEQ ID NO: 12908 - protein, 15 aa, HUMAN IMMUNODEFICIENCY VIRUS
NKTLGNNSTNSTLGN

SEQ ID NO: 12909 - protein, 15 aa, HUMAN IMMUNODEFICIENCY VIRUS
ARPVISTRTHREKRA

SEQ ID NO: 12910 - protein, 15 aa, HUMAN IMMUNODEFICIENCY VIRUS
QNLWRWGTLFLGMLM

SEQ ID NO: 12911 - protein, 15 aa, HUMAN IMMUNODEFICIENCY VIRUS
QHLWRWGTMLLGMLM

SEQ ID NO: 12912 - protein, 15 aa, HUMAN IMMUNODEFICIENCY VIRUS
RIVFAVLSIVNRVRQ

SEQ ID NO: 12913 - protein, 15 aa, HUMAN IMMUNODEFICIENCY VIRUS
TQLLLNGSLAEEEVV

SEQ ID NO: 12914 - protein, 15 aa, HUMAN IMMUNODEFICIENCY VIRUS
CVKLTPLCVTLNCTD

SEQ ID NO: 12915 - protein, 15 aa, HUMAN IMMUNODEFICIENCY VIRUS
RSELYKYKVVKIEPL

SEQ ID NO: 12916 - protein, 15 aa, HUMAN IMMUNODEFICIENCY VIRUS
TTNVPWNSSWSNKSL

SEQ ID NO: 12917 - protein, 15 aa, HUMAN IMMUNODEFICIENCY VIRUS
YKEYRLINCNTSAIT

SEQ ID NO: 12918 - protein, 15 aa, HUMAN IMMUNODEFICIENCY VIRUS
PIPIHYCAPAGFAIL

SEQ ID NO: 12919 - protein, 15 aa, HUMAN IMMUNODEFICIENCY VIRUS
ERYLKDQQLLGIWGC

SEQ ID NO: 12920 - protein, 15 aa, HUMAN IMMUNODEFICIENCY VIRUS
SELYKYKVVKIEPLG

SEQ ID NO: 12921 - protein, 15 aa, HUMAN IMMUNODEFICIENCY VIRUS
THGIRPVVSTQLLLN

SEQ ID NO: 12922 - protein, 15 aa, HUMAN IMMUNODEFICIENCY VIRUS
LLALDKWASLWNWFD

SEQ ID NO: 12923 - protein, 15 aa, HUMAN IMMUNODEFICIENCY VIRUS
LIGLRIVFAVLSIVN

SEQ ID NO: 12924 - protein, 15 aa, HUMAN IMMUNODEFICIENCY VIRUS
QLLLNGSLAEEEVVI

SEQ ID NO: 12925 - protein, 15 aa, HUMAN IMMUNODEFICIENCY VIRUS
LYKYKVVKIEPLGVA

SEQ ID NO: 12926 - protein, 15 aa, HUMAN IMMUNODEFICIENCY VIRUS
RSSLKGLRLGWEGLK

SEQ ID NO: 12927 - protein, 15 aa, HUMAN IMMUNODEFICIENCY VIRUS
LCLFSYHRLRDLLLI

SEQ ID NO: 12928 - protein, 15 aa, HUMAN IMMUNODEFICIENCY VIRUS
SVEINCTRPNNNTRK

SEQ ID NO: 12929 - protein, 15 aa, HUMAN IMMUNODEFICIENCY VIRUS
KYKVVKIEPLGVAPT

SEQ ID NO: 12930 - protein, 15 aa, HUMAN IMMUNODEFICIENCY VIRUS
VPVWKEATTTLFCAS

SEQ ID NO: 12931 - protein, 15 aa, HUMAN IMMUNODEFICIENCY VIRUS
GGLIGLRIVFAVLSI

SEQ ID NO: 12932 - protein, 15 aa, HUMAN IMMUNODEFICIENCY VIRUS
GGEFFYCNTSGLFNS

SEQ ID NO: 12933 - protein, 15 aa, HUMAN IMMUNODEFICIENCY VIRUS
RAAFGLGALFLGFLG

SEQ ID NO: 12934 - protein, 15 aa, HUMAN IMMUNODEFICIENCY VIRUS
GEFFYCNTSGLFNST

SEQ ID NO: 12935 - protein, 15 aa, HUMAN IMMUNODEFICIENCY VIRUS
VGGLIGLRIVFAVLS

SEQ ID NO: 12936 - protein, 15 aa, HUMAN IMMUNODEFICIENCY VIRUS
KRAVGLGAVFLGFLG

SEQ ID NO: 12937 - protein, 15 aa, HUMAN IMMUNODEFICIENCY VIRUS
KRAVGLGMLFLGVLS

SEQ ID NO: 12938 - protein, 15 aa, HUMAN IMMUNODEFICIENCY VIRUS
GKLICTTAVPWNSSW

SEQ ID NO: 12939 - protein, 15 aa, HUMAN IMMUNODEFICIENCY VIRUS
GKLICTTNVPWNSSW

SEQ ID NO: 12940 - protein, 15 aa, HUMAN IMMUNODEFICIENCY VIRUS
IEPLGVAPTKAKRRV

SEQ ID NO: 12941 - protein, 15 aa, HUMAN IMMUNODEFICIENCY VIRUS
SGKLICTTAVPWNSS

SEQ ID NO: 12942 - protein, 15 aa, HUMAN IMMUNODEFICIENCY VIRUS
ERYLRDQQLLGIWGC

SEQ ID NO: 12943 - protein, 15 aa, HUMAN IMMUNODEFICIENCY VIRUS
LGAVFLGFLGAAGST

SEQ ID NO: 12944 - protein, 15 aa, HUMAN IMMUNODEFICIENCY VIRUS
LCLFSYHRLRDFILI

SEQ ID NO: 12945 - protein, 15 aa, HUMAN IMMUNODEFICIENCY VIRUS
FEPIPIHYCTPAGFA

SEQ ID NO: 12946 - protein, 15 aa, HUMAN IMMUNODEFICIENCY VIRUS
GLRIVFAVLSIVNRV

SEQ ID NO: 12947 - protein, 15 aa, HUMAN IMMUNODEFICIENCY VIRUS
LRIVFAVLSIVNRVR

SEQ ID NO: 12948 - protein, 15 aa, HUMAN IMMUNODEFICIENCY VIRUS
TTAVPWNASWSNKSL

SEQ ID NO: 12949 - protein, 15 aa, HUMAN IMMUNODEFICIENCY VIRUS
GGLIGLRIIFAVLSI

SEQ ID NO: 12950 - protein, 15 aa, HUMAN IMMUNODEFICIENCY VIRUS
IGDIRQAHCNISRAK

SEQ ID NO: 12951 - protein, 15 aa, HUMAN IMMUNODEFICIENCY VIRUS
PLGVAPTKAKRRVVQ

SEQ ID NO: 12952 - protein, 15 aa, HUMAN IMMUNODEFICIENCY VIRUS
DKKFNGTGPCKNVST

SEQ ID NO: 12953 - protein, 15 aa, HUMAN IMMUNODEFICIENCY VIRUS
SVRIGPGQTFYATGD

SEQ ID NO: 12954 - protein, 15 aa, HUMAN IMMUNODEFICIENCY VIRUS
RYSIGSGQAFYVTGK

SEQ ID NO: 12955 - protein, 15 aa, HUMAN IMMUNODEFICIENCY VIRUS
QTAIRYLNLVNQTEN

SEQ ID NO: 12956 - protein, 15 aa, HUMAN IMMUNODEFICIENCY VIRUS
VGGLIGLRIIFAVLS

SEQ ID NO: 12957 - protein, 15 aa, HUMAN IMMUNODEFICIENCY VIRUS
WWNLLQYWSQELKNS

SEQ ID NO: 12958 - protein, 15 aa, HUMAN IMMUNODEFICIENCY VIRUS
WDDLRNLCLFSYHRL

SEQ ID NO: 12959 - protein, 15 aa, HUMAN IMMUNODEFICIENCY VIRUS
SIRLVSGFLALAWDD

SEQ ID NO: 12960 - protein, 15 aa, HUMAN IMMUNODEFICIENCY VIRUS
IRLVSGFLALAWDDL

SEQ ID NO: 12961 - protein, 15 aa, HUMAN IMMUNODEFICIENCY VIRUS
KVTFDPIPIHYCTPA

SEQ ID NO: 12962 - protein, 15 aa, HUMAN IMMUNODEFICIENCY VIRUS
GLRIIFAVLSIVNRV

SEQ ID NO: 12963 - protein, 15 aa, HUMAN IMMUNODEFICIENCY VIRUS
EYRLINCNTSAITQA

SEQ ID NO: 12964 - protein, 15 aa, HUMAN IMMUNODEFICIENCY VIRUS
AVSLLNATAIAVAEG

SEQ ID NO: 12965 - protein, 15 aa, HUMAN IMMUNODEFICIENCY VIRUS
LIGLRIIFAVLSIVN

SEQ ID NO: 12966 - protein, 15 aa, HUMAN IMMUNODEFICIENCY VIRUS
NTSVITQACPKVSFE

SEQ ID NO: 12967 - protein, 15 aa, HUMAN IMMUNODEFICIENCY VIRUS
VLKYWWNLLQYWSQE

SEQ ID NO: 12968 - protein, 15 aa, HUMAN IMMUNODEFICIENCY VIRUS
PAGFAILKCNDKKFN

SEQ ID NO: 12969 - protein, 15 aa, HUMAN IMMUNODEFICIENCY VIRUS
LRIIFAVLSIVNRVR

SEQ ID NO: 12970 - protein, 15 aa, HUMAN IMMUNODEFICIENCY VIRUS
YRLINCNTSAITQAC

SEQ ID NO: 12971 - protein, 15 aa, HUMAN IMMUNODEFICIENCY VIRUS
VSLLNATAIAVAEGT

SEQ ID NO: 12972 - protein, 15 aa, HUMAN IMMUNODEFICIENCY VIRUS
NVPWNSSWSNKSLDE

SEQ ID NO: 12973 - protein, 15 aa, HUMAN IMMUNODEFICIENCY VIRUS
NVPWNASWSNKSYED

SEQ ID NO: 12974 - protein, 15 aa, HUMAN IMMUNODEFICIENCY VIRUS
GKLICTTTVPWNASW

SEQ ID NO: 12975 - protein, 15 aa, HUMAN IMMUNODEFICIENCY VIRUS
QQHLLKLTVWGIKQL

SEQ ID NO: 12976 - protein, 15 aa, HUMAN IMMUNODEFICIENCY VIRUS
RSELYKYKVVEIKPL

SEQ ID NO: 12977 - protein, 15 aa, HUMAN IMMUNODEFICIENCY VIRUS
LGAMFLGFLGAAGST

SEQ ID NO: 12978 - protein, 15 aa, HUMAN IMMUNODEFICIENCY VIRUS
EIVMHSFNCGGEFFY

SEQ ID NO: 12979 - protein, 15 aa, HUMAN IMMUNODEFICIENCY VIRUS
LLQYWSQELKNSAVS

SEQ ID NO: 12980 - protein, 15 aa, HUMAN IMMUNODEFICIENCY VIRUS
AVGIGAVFLGFLGAA

SEQ ID NO: 12981 - protein, 15 aa, HUMAN IMMUNODEFICIENCY VIRUS
DFILIAARTVELLGH

SEQ ID NO: 12982 - protein, 15 aa, HUMAN IMMUNODEFICIENCY VIRUS
SGKLICTTTVPWNAS

SEQ ID NO: 12983 - protein, 15 aa, HUMAN IMMUNODEFICIENCY VIRUS
TQLLLNGSLAEGEII

SEQ ID NO: 12984 - protein, 15 aa, HUMAN IMMUNODEFICIENCY VIRUS
LVWYWGQELKNSAIS

SEQ ID NO: 12985 - protein, 15 aa, HUMAN IMMUNODEFICIENCY VIRUS
FILIAARTVELLGHS

SEQ ID NO: 12986 - protein, 15 aa, HUMAN IMMUNODEFICIENCY VIRUS
IGALFLGFLGAAGST

SEQ ID NO: 12987 - protein, 15 aa, HUMAN IMMUNODEFICIENCY VIRUS
SQELKNSAVSLLNAT

SEQ ID NO: 12988 - protein, 15 aa, HUMAN IMMUNODEFICIENCY VIRUS
KRAVGIGAVFLGFLG

SEQ ID NO: 12989 - protein, 15 aa, HUMAN IMMUNODEFICIENCY VIRUS
NSAVSLLNATAIAVA

SEQ ID NO: 12990 - protein, 15 aa, HUMAN IMMUNODEFICIENCY VIRUS
QTFYATGDIIGDIRQ

SEQ ID NO: 12991 - protein, 15 aa, HUMAN IMMUNODEFICIENCY VIRUS
LDIIAIAVAEGTDRI

SEQ ID NO: 12992 - protein, 15 aa, HUMAN IMMUNODEFICIENCY VIRUS
PIPIHYCTPAGFAIL

SEQ ID NO: 12993 - protein, 15 aa, HUMAN IMMUNODEFICIENCY VIRUS
GTLILGLVIICSASN

SEQ ID NO: 12994 - protein, 15 aa, HUMAN IMMUNODEFICIENCY VIRUS
VDEIWNNMTWMEWER

SEQ ID NO: 12995 - protein, 15 aa, HUMAN IMMUNODEFICIENCY VIRUS
TLILGLVIICSASNN

SEQ ID NO: 12996 - protein, 15 aa, HUMAN IMMUNODEFICIENCY VIRUS
YHRLRDFILIAARTV

SEQ ID NO: 12997 - protein, 15 aa, HUMAN IMMUNODEFICIENCY VIRUS
CVKLTPLCVTLDCHN

SEQ ID NO: 12998 - protein, 15 aa, HUMAN IMMUNODEFICIENCY VIRUS
QQHMLQLTVWGIKQL

SEQ ID NO: 12999 - protein, 15 aa, HUMAN IMMUNODEFICIENCY VIRUS
NESVEINCTRPNNNT

SEQ ID NO: 13000 - protein, 15 aa, HUMAN IMMUNODEFICIENCY VIRUS
TVQVRQLLSGIVQQQ

SEQ ID NO: 13001 - protein, 15 aa, HUMAN IMMUNODEFICIENCY VIRUS
WGTLILGLVIICSAS

SEQ ID NO: 13002 - protein, 15 aa, HUMAN IMMUNODEFICIENCY VIRUS
LNTVGGHQAAMQMLK

SEQ ID NO: 13003 - protein, 15 aa, HUMAN IMMUNODEFICIENCY VIRUS
TETLLVQNANPDCKT

SEQ ID NO: 13004 - protein, 15 aa, HUMAN IMMUNODEFICIENCY VIRUS
TLLVQNANPDCKTIL

SEQ ID NO: 13005 - protein, 15 aa, HUMAN IMMUNODEFICIENCY VIRUS
WIILGLNKIVRMYSP

SEQ ID NO: 13006 - protein, 15 aa, HUMAN IMMUNODEFICIENCY VIRUS
FSALSEGATPQDLNT

SEQ ID NO: 13007 - protein, 15 aa, HUMAN IMMUNODEFICIENCY VIRUS
YKRWIILGLNKIVRM

SEQ ID NO: 13008 - protein, 15 aa, HUMAN IMMUNODEFICIENCY VIRUS
GATLEEMMTACQGVG

SEQ ID NO: 13009 - protein, 15 aa, HUMAN IMMUNODEFICIENCY VIRUS
GEIYKRWIILGLNKI

SEQ ID NO: 13010 - protein, 15 aa, HUMAN IMMUNODEFICIENCY VIRUS
VGEIYKRWIILGLNK

SEQ ID NO: 13011 - protein, 15 aa, HUMAN IMMUNODEFICIENCY VIRUS
SSQVSQNYPIVQNLQ

SEQ ID NO: 13012 - protein, 15 aa, HUMAN IMMUNODEFICIENCY VIRUS
LDKWEKIRLRPGGKK

SEQ ID NO: 13013 - protein, 15 aa, HUMAN IMMUNODEFICIENCY VIRUS
GSDIAGTTSTLQEQI

SEQ ID NO: 13014 - protein, 15 aa, HUMAN IMMUNODEFICIENCY VIRUS
HLVWASRELERFALN

SEQ ID NO: 13015 - protein, 15 aa, HUMAN IMMUNODEFICIENCY VIRUS
PEVIPMFSALSEGAT

SEQ ID NO: 13016 - protein, 15 aa, HUMAN IMMUNODEFICIENCY VIRUS
VIPMFSALSEGATPQ

SEQ ID NO: 13017 - protein, 15 aa, HUMAN IMMUNODEFICIENCY VIRUS
SPEVIPMFSALSEGA

SEQ ID NO: 13018 - protein, 15 aa, HUMAN IMMUNODEFICIENCY VIRUS
IVRMYSPVSILDIRQ

SEQ ID NO: 13019 - protein, 15 aa, HUMAN IMMUNODEFICIENCY VIRUS
LNKIVRMYSPVSILD

SEQ ID NO: 13020 - protein, 15 aa, HUMAN IMMUNODEFICIENCY VIRUS
NKIVRMYSPVSILDI

SEQ ID NO: 13021 - protein, 15 aa, HUMAN IMMUNODEFICIENCY VIRUS
VRMYSPVSILDIRQG

SEQ ID NO: 13022 - protein, 15 aa, HUMAN IMMUNODEFICIENCY VIRUS
KNWMTETLLVQNANP

SEQ ID NO: 13023 - protein, 15 aa, HUMAN IMMUNODEFICIENCY VIRUS
VKNWMTETLLVQNAN

SEQ ID NO: 13024 - protein, 15 aa, HUMAN IMMUNODEFICIENCY VIRUS
HQAISPRTLNAWVKV

SEQ ID NO: 13025 - protein, 15 aa, HUMAN IMMUNODEFICIENCY VIRUS
TQEVKNWMTETLLVQ

SEQ ID NO: 13026 - protein, 15 aa, HUMAN IMMUNODEFICIENCY VIRUS
QKRIKCFNCGKEGHL

SEQ ID NO: 13027 - protein, 15 aa, HUMAN IMMUNODEFICIENCY VIRUS
NPPIPVGEIYKRWII

SEQ ID NO: 13028 - protein, 15 aa, HUMAN IMMUNODEFICIENCY VIRUS
KGGYTAVFMQRGQNP

SEQ ID NO: 13029 - protein, 15 aa, HUMAN IMMUNODEFICIENCY VIRUS
YNTVATLYCVHQRIE

SEQ ID NO: 13030 - protein, 15 aa, HUMAN IMMUNODEFICIENCY VIRUS
AAEWDRLHPVHAGPI

SEQ ID NO: 13031 - protein, 15 aa, HUMAN IMMUNODEFICIENCY VIRUS
PGNFLQSRPEPTAPP

SEQ ID NO: 13032 - protein, 15 aa, HUMAN IMMUNODEFICIENCY VIRUS
DRFFKTLRAEQATQE

SEQ ID NO: 13033 - protein, 15 aa, HUMAN IMMUNODEFICIENCY VIRUS
QGQMVHQAISPRTLN

SEQ ID NO: 13034 - protein, 15 aa, HUMAN IMMUNODEFICIENCY VIRUS
GQMVHQAISPRTLNA

SEQ ID NO: 13035 - protein, 15 aa, HUMAN IMMUNODEFICIENCY VIRUS
DRFYKTLRAEQASQE

SEQ ID NO: 13036 - protein, 15 aa, HUMAN IMMUNODEFICIENCY VIRUS
YSPVSILDIRQGPKE

SEQ ID NO: 13037 - protein, 15 aa, HUMAN IMMUNODEFICIENCY VIRUS
ARVLAEAMSQVTNSA

SEQ ID NO: 13038 - protein, 15 aa, HUMAN IMMUNODEFICIENCY VIRUS
ANFLGKIWPSHKGRP

SEQ ID NO: 13039 - protein, 15 aa, HUMAN IMMUNODEFICIENCY VIRUS
RKTVKCFNCGKEGHI

SEQ ID NO: 13040 - protein, 15 aa, HUMAN IMMUNODEFICIENCY VIRUS
RSLYNTVATLYCVHQ

SEQ ID NO: 13041 - protein, 15 aa, HUMAN IMMUNODEFICIENCY VIRUS
WDRLHPVHAGPIAPG

SEQ ID NO: 13042 - protein, 15 aa, HUMAN IMMUNODEFICIENCY VIRUS
LRSLYNTVATLYCVH

SEQ ID NO: 13043 - protein, 15 aa, HUMAN IMMUNODEFICIENCY VIRUS
KNWMTDTLLVQNANP

SEQ ID NO: 13044 - protein, 15 aa, HUMAN IMMUNODEFICIENCY VIRUS
VKNWMTDTLLVQNAN

SEQ ID NO: 13045 - protein, 15 aa, HUMAN IMMUNODEFICIENCY VIRUS
HQRIEVKDTKEALDK

SEQ ID NO: 13046 - protein, 15 aa, HUMAN IMMUNODEFICIENCY VIRUS
VQNLQGQMVHQAISP

SEQ ID NO: 13047 - protein, 15 aa, HUMAN IMMUNODEFICIENCY VIRUS
IGWMTNNPPIPVGEI

SEQ ID NO: 13048 - protein, 15 aa, HUMAN IMMUNODEFICIENCY VIRUS
QIGWMTNNPPIPVGE

SEQ ID NO: 13049 - protein, 15 aa, HUMAN IMMUNODEFICIENCY VIRUS
AGPIAPGQMREPRGS

SEQ ID NO: 13050 - protein, 15 aa, HUMAN IMMUNODEFICIENCY VIRUS
LHPVHAGPIAPGQMR

SEQ ID NO: 13051 - protein, 15 aa, HUMAN IMMUNODEFICIENCY VIRUS
LRALGPGATLEEMMT

SEQ ID NO: 13052 - protein, 15 aa, HUMAN IMMUNODEFICIENCY VIRUS
VHPVHAGPIPPGQMR

SEQ ID NO: 13053 - protein, 15 aa, HUMAN IMMUNODEFICIENCY VIRUS
AGPIPPGQMREPRGS

SEQ ID NO: 13054 - protein, 15 aa, HUMAN IMMUNODEFICIENCY VIRUS
HQALSPRTLNAWVKV

SEQ ID NO: 13055 - protein, 15 aa, HUMAN IMMUNODEFICIENCY VIRUS
KKKYRLKHLVWASRE

SEQ ID NO: 13056 - protein, 15 aa, HUMAN IMMUNODEFICIENCY VIRUS
LKALGPAATLEEMMT

SEQ ID NO: 13057 - protein, 15 aa, HUMAN IMMUNODEFICIENCY VIRUS
KTILKALGPAATLEE

SEQ ID NO: 13058 - protein, 15 aa, HUMAN IMMUNODEFICIENCY VIRUS
QEQLKDKEPPLASLR

SEQ ID NO: 13059 - protein, 15 aa, HUMAN IMMUNODEFICIENCY VIRUS
ASVLSGGKLDAWEKI

SEQ ID NO: 13060 - protein, 15 aa, HUMAN IMMUNODEFICIENCY VIRUS
IGWMTSNPPIPVGEI

SEQ ID NO: 13061 - protein, 15 aa, HUMAN IMMUNODEFICIENCY VIRUS
TQDVKNWMTDTLLVQ

SEQ ID NO: 13062 - protein, 15 aa, HUMAN IMMUNODEFICIENCY VIRUS
YSPVSILDIKQGPKE

SEQ ID NO: 13063 - protein, 15 aa, HUMAN IMMUNODEFICIENCY VIRUS
QIGWMTSNPPIPVGE

SEQ ID NO: 13064 - protein, 15 aa, HUMAN IMMUNODEFICIENCY VIRUS
KSLFNTVATLYCVHQ

SEQ ID NO: 13065 - protein, 15 aa, HUMAN IMMUNODEFICIENCY VIRUS
PEVIPMFTALSEGAT

SEQ ID NO: 13066 - protein, 15 aa, HUMAN IMMUNODEFICIENCY VIRUS
LYPLASLKSLFGNDP

SEQ ID NO: 13067 - protein, 15 aa, HUMAN IMMUNODEFICIENCY VIRUS
SRELERFAVNPGLLE

SEQ ID NO: 13068 - protein, 15 aa, HUMAN IMMUNODEFICIENCY VIRUS
LRSLFNTVATLYCVH

SEQ ID NO: 13069 - protein, 15 aa, HUMAN IMMUNODEFICIENCY VIRUS
VIPMFTALSEGATPQ

SEQ ID NO: 13070 - protein, 15 aa, HUMAN IMMUNODEFICIENCY VIRUS
AAEWDRVHPVHAGPI

SEQ ID NO: 13071 - protein, 15 aa, HUMAN IMMUNODEFICIENCY VIRUS
LNKIVRMYSPTSILD

SEQ ID NO: 13072 - protein, 15 aa, HUMAN IMMUNODEFICIENCY VIRUS
SRELERFALNPGLLE

SEQ ID NO: 13073 - protein, 15 aa, HUMAN IMMUNODEFICIENCY VIRUS
TSTLQEQIAWMTGNP

SEQ ID NO: 13074 - protein, 15 aa, HUMAN IMMUNODEFICIENCY VIRUS
WDRVHPVHAGPIPPG

SEQ ID NO: 13075 - protein, 15 aa, HUMAN IMMUNODEFICIENCY VIRUS
SPEVIPMFTALSEGA

SEQ ID NO: 13076 - protein, 15 aa, HUMAN IMMUNODEFICIENCY VIRUS
NKIVRMYSPTSILDI

SEQ ID NO: 13077 - protein, 15 aa, HUMAN IMMUNODEFICIENCY VIRUS
ANFLGKIWPSNKGRP

SEQ ID NO: 13078 - protein, 15 aa, HUMAN IMMUNODEFICIENCY VIRUS
LYPLTSLKSLFGNDP

SEQ ID NO: 13079 - protein, 15 aa, HUMAN IMMUNODEFICIENCY VIRUS
IVRMYSPTSILDIRQ

SEQ ID NO: 13080 - protein, 15 aa, HUMAN IMMUNODEFICIENCY VIRUS
KKKYKLKHIVWASRE

SEQ ID NO: 13081 - protein, 15 aa, HUMAN IMMUNODEFICIENCY VIRUS
VRMYSPTSILDIRQG

SEQ ID NO: 13082 - protein, 15 aa, HUMAN IMMUNODEFICIENCY VIRUS
LYPLTSLRSLFGNDP

SEQ ID NO: 13083 - protein, 15 aa, HUMAN IMMUNODEFICIENCY VIRUS
DLNMMLNIVGGHQAA

SEQ ID NO: 13084 - protein, 15 aa, HUMAN IMMUNODEFICIENCY VIRUS
HQRIDVKDTKEALDK

SEQ ID NO: 13085 - protein, 15 aa, HUMAN IMMUNODEFICIENCY VIRUS
QEQIGWMTSNPPIPV

SEQ ID NO: 13086 - protein, 15 aa, HUMAN IMMUNODEFICIENCY VIRUS
NPPIPVGDIYKRWII

SEQ ID NO: 13087 - protein, 15 aa, HUMAN IMMUNODEFICIENCY VIRUS
DKELYPLASLKSLFG

SEQ ID NO: 13088 - protein, 15 aa, HUMAN IMMUNODEFICIENCY VIRUS
GQMVHQALSPRTLNA

SEQ ID NO: 13089 - protein, 15 aa, HUMAN IMMUNODEFICIENCY VIRUS
RFAVNPGLLETSEGC

SEQ ID NO: 13090 - protein, 15 aa, HUMAN IMMUNODEFICIENCY VIRUS
KELYPLASLKSLFGN

SEQ ID NO: 13091 - protein, 15 aa, HUMAN IMMUNODEFICIENCY VIRUS
PGNFLQNRPEPTAPP

SEQ ID NO: 13092 - protein, 15 aa, HUMAN IMMUNODEFICIENCY VIRUS
AAAIMMQKSNFKGPR

SEQ ID NO: 13093 - protein, 15 aa, HUMAN IMMUNODEFICIENCY VIRUS
ARVLAEAMSQVQQSN

SEQ ID NO: 13094 - protein, 15 aa, HUMAN IMMUNODEFICIENCY VIRUS
ANFLGKIWPSSKGRP

SEQ ID NO: 13095 - protein, 15 aa, HUMAN IMMUNODEFICIENCY VIRUS
RFALNPGLLETAEGC

SEQ ID NO: 13096 - protein, 15 aa, HUMAN IMMUNODEFICIENCY VIRUS
KELYPLASLRSLFGN

SEQ ID NO: 13097 - protein, 15 aa, HUMAN IMMUNODEFICIENCY VIRUS
FPDWQNYTPGPGIRY

SEQ ID NO: 13098 - protein, 15 aa, HUMAN IMMUNODEFICIENCY VIRUS
GFPVRPQVPLRPMTY

SEQ ID NO: 13099 - protein, 15 aa, HUMAN IMMUNODEFICIENCY VIRUS
RPQVPLRPMTYKGAF

SEQ ID NO: 13100 - protein, 15 aa, HUMAN IMMUNODEFICIENCY VIRUS
RYPLTFGWCFKLVPV

SEQ ID NO: 13101 - protein, 15 aa, HUMAN IMMUNODEFICIENCY VIRUS
RQEILDLWVYHTQGY

SEQ ID NO: 13102 - protein, 15 aa, HUMAN IMMUNODEFICIENCY VIRUS
TFGWCFKLVPVDPRE

SEQ ID NO: 13103 - protein, 15 aa, HUMAN IMMUNODEFICIENCY VIRUS
ILDLWVYHTQGYFPD

SEQ ID NO: 13104 - protein, 15 aa, HUMAN IMMUNODEFICIENCY VIRUS
GGKWSKSSIVGWPAI

SEQ ID NO: 13105 - protein, 15 aa, HUMAN IMMUNODEFICIENCY VIRUS
RQDILDLWVYNTQGY

SEQ ID NO: 13106 - protein, 15 aa, HUMAN IMMUNODEFICIENCY VIRUS
NNCLLHPMSQHGMDD

SEQ ID NO: 13107 - protein, 15 aa, HUMAN IMMUNODEFICIENCY VIRUS
NNSLLHPICQHGMED

SEQ ID NO: 13108 - protein, 15 aa, HUMAN IMMUNODEFICIENCY VIRUS
GPGIRYPLTFGWCFK

SEQ ID NO: 13109 - protein, 15 aa, HUMAN IMMUNODEFICIENCY VIRUS
HGAITSSNTAATNAD

SEQ ID NO: 13110 - protein, 15 aa, HUMAN IMMUNODEFICIENCY VIRUS
SRDLEKHGAITSSNT

SEQ ID NO: 13111 - protein, 15 aa, HUMAN IMMUNODEFICIENCY VIRUS
ILDLWVYHTQGFFPD

SEQ ID NO: 13112 - protein, 15 aa, HUMAN IMMUNODEFICIENCY VIRUS
LRPMTYKGAFDLSFF

SEQ ID NO: 13113 - protein, 15 aa, HUMAN IMMUNODEFICIENCY VIRUS
CFKLVPVDPREVEEA

SEQ ID NO: 13114 - protein, 15 aa, HUMAN IMMUNODEFICIENCY VIRUS
SSIVGWPAIRERMRR

SEQ ID NO: 13115 - protein, 15 aa, HUMAN IMMUNODEFICIENCY VIRUS
TFGWCFKLVPVEPEK

SEQ ID NO: 13116 - protein, 15 aa, HUMAN IMMUNODEFICIENCY VIRUS
EWRFDSRLAFHHVAR

SEQ ID NO: 13117 - protein, 15 aa, HUMAN IMMUNODEFICIENCY VIRUS
GWCFKLVPVDPREVE

SEQ ID NO: 13118 - protein, 15 aa, HUMAN IMMUNODEFICIENCY VIRUS
RPQVPLRPMTFKGAF

SEQ ID NO: 13119 - protein, 15 aa, HUMAN IMMUNODEFICIENCY VIRUS
KEALLDTGADDTVLE

SEQ ID NO: 13120 - protein, 15 aa, HUMAN IMMUNODEFICIENCY VIRUS
PFLWMGYELHPDKWT

SEQ ID NO: 13121 - protein, 15 aa, HUMAN IMMUNODEFICIENCY VIRUS
GIRYQYNVLPQGWKG

SEQ ID NO: 13122 - protein, 15 aa, HUMAN IMMUNODEFICIENCY VIRUS
DKDFRKYTAFTIPSI

SEQ ID NO: 13123 - protein, 15 aa, HUMAN IMMUNODEFICIENCY VIRUS
KDSWTVNDIQKLVGK

SEQ ID NO: 13124 - protein, 15 aa, HUMAN IMMUNODEFICIENCY VIRUS
IWQLDCTHLEGKIIL

SEQ ID NO: 13125 - protein, 15 aa, HUMAN IMMUNODEFICIENCY VIRUS
VTVLDVGDAYFSVPL

SEQ ID NO: 13126 - protein, 15 aa, HUMAN IMMUNODEFICIENCY VIRUS
YQYMDDLYVGSDLEI

SEQ ID NO: 13127 - protein, 15 aa, HUMAN IMMUNODEFICIENCY VIRUS
EAEVIPAETGQETAY

SEQ ID NO: 13128 - protein, 15 aa, HUMAN IMMUNODEFICIENCY VIRUS
KLLWKGEGAVVIQDN

SEQ ID NO: 13129 - protein, 15 aa, HUMAN IMMUNODEFICIENCY VIRUS
PGIWQLDCTHLEGKI

SEQ ID NO: 13130 - protein, 15 aa, HUMAN IMMUNODEFICIENCY VIRUS
RKLVDFRELNKRTQD

SEQ ID NO: 13131 - protein, 15 aa, HUMAN IMMUNODEFICIENCY VIRUS
PGKWKPKMIGGIGGF

SEQ ID NO: 13132 - protein, 15 aa, HUMAN IMMUNODEFICIENCY VIRUS
SPGIWQLDCTHLEGK

SEQ ID NO: 13133 - protein, 15 aa, HUMAN IMMUNODEFICIENCY VIRUS
IILVAVHVASGYIEA

SEQ ID NO: 13134 - protein, 15 aa, HUMAN IMMUNODEFICIENCY VIRUS
PQGWKGSPAIFQSSM

SEQ ID NO: 13135 - protein, 15 aa, HUMAN IMMUNODEFICIENCY VIRUS
KGGIGGYSAGERIID

SEQ ID NO: 13136 - protein, 15 aa, HUMAN IMMUNODEFICIENCY VIRUS
DSQYALGIIQAQPDK

SEQ ID NO: 13137 - protein, 15 aa, HUMAN IMMUNODEFICIENCY VIRUS
TQDFWEVQLGIPHPA

SEQ ID NO: 13138 - protein, 15 aa, HUMAN IMMUNODEFICIENCY VIRUS
VFAIKKKDSTKWRKL

SEQ ID NO: 13139 - protein, 15 aa, HUMAN IMMUNODEFICIENCY VIRUS
QYALGIIQAQPDKSE

SEQ ID NO: 13140 - protein, 15 aa, HUMAN IMMUNODEFICIENCY VIRUS
EVQLGIPHPAGLKKK

SEQ ID NO: 13141 - protein, 15 aa, HUMAN IMMUNODEFICIENCY VIRUS
WEFVNTPPLVKLWYQ

SEQ ID NO: 13142 - protein, 15 aa, HUMAN IMMUNODEFICIENCY VIRUS
KKSVTVLDVGDAYFS

SEQ ID NO: 13143 - protein, 15 aa, HUMAN IMMUNODEFICIENCY VIRUS
TLNFPISPIETVPVK

SEQ ID NO: 13144 - protein, 15 aa, HUMAN IMMUNODEFICIENCY VIRUS
NFPISPIETVPVKLK

SEQ ID NO: 13145 - protein, 15 aa, HUMAN IMMUNODEFICIENCY VIRUS
EWEFVNTPPLVKLWY

SEQ ID NO: 13146 - protein, 15 aa, HUMAN IMMUNODEFICIENCY VIRUS
GCTLNFPISPIETVP

SEQ ID NO: 13147 - protein, 15 aa, HUMAN IMMUNODEFICIENCY VIRUS
IPEWEFVNTPPLVKL

SEQ ID NO: 13148 - protein, 15 aa, HUMAN IMMUNODEFICIENCY VIRUS
ITKIQNFRVYYRDSR

SEQ ID NO: 13149 - protein, 15 aa, HUMAN IMMUNODEFICIENCY VIRUS
GTVLVGPTPVNIIGR

SEQ ID NO: 13150 - protein, 15 aa, HUMAN IMMUNODEFICIENCY VIRUS
FWEVQLGIPHPAGLK

SEQ ID NO: 13151 - protein, 15 aa, HUMAN IMMUNODEFICIENCY VIRUS
TEYWQATWIPEWEFV

SEQ ID NO: 13152 - protein, 15 aa, HUMAN IMMUNODEFICIENCY VIRUS
ISPIETVPVKLKPGM

SEQ ID NO: 13153 - protein, 15 aa, HUMAN IMMUNODEFICIENCY VIRUS
KKAIGTVLVGPTPVN

SEQ ID NO: 13154 - protein, 15 aa, HUMAN IMMUNODEFICIENCY VIRUS
KIILVAVHVASGYIE

SEQ ID NO: 13155 - protein, 15 aa, HUMAN IMMUNODEFICIENCY VIRUS
IGTVLVGPTPVNIIG

SEQ ID NO: 13156 - protein, 15 aa, HUMAN IMMUNODEFICIENCY VIRUS
ASGYIEAEVIPAETG

SEQ ID NO: 13157 - protein, 15 aa, HUMAN IMMUNODEFICIENCY VIRUS
DDLYVGSDLEIGQHR

SEQ ID NO: 13158 - protein, 15 aa, HUMAN IMMUNODEFICIENCY VIRUS
KPGMDGPKVKQWPLT

SEQ ID NO: 13159 - protein, 15 aa, HUMAN IMMUNODEFICIENCY VIRUS
AVHVASGYIEAEVIP

SEQ ID NO: 13160 - protein, 15 aa, HUMAN IMMUNODEFICIENCY VIRUS
TVLVGPTPVNIIGRN

SEQ ID NO: 13161 - protein, 15 aa, HUMAN IMMUNODEFICIENCY VIRUS
GPKVKQWPLTEEKIK

SEQ ID NO: 13162 - protein, 15 aa, HUMAN IMMUNODEFICIENCY VIRUS
NFRVYYRDSRDPIWK

SEQ ID NO: 13163 - protein, 15 aa, HUMAN IMMUNODEFICIENCY VIRUS
LLRWGFTTPDKKHQK

SEQ ID NO: 13164 - protein, 15 aa, HUMAN IMMUNODEFICIENCY VIRUS
PEIVIYQYMDDLYVG

SEQ ID NO: 13165 - protein, 15 aa, HUMAN IMMUNODEFICIENCY VIRUS
PAGLKKKKSVTVLDV

SEQ ID NO: 13166 - protein, 15 aa, HUMAN IMMUNODEFICIENCY VIRUS
IKVVPRRKAKIIRDY

SEQ ID NO: 13167 - protein, 15 aa, HUMAN IMMUNODEFICIENCY VIRUS
SFSFPQITLWQRPLV

SEQ ID NO: 13168 - protein, 15 aa, HUMAN IMMUNODEFICIENCY VIRUS
ESIVIWGKTPKFRLP

SEQ ID NO: 13169 - protein, 15 aa, HUMAN IMMUNODEFICIENCY VIRUS
ETFYVDGAANRETKL

SEQ ID NO: 13170 - protein, 15 aa, HUMAN IMMUNODEFICIENCY VIRUS
QEPFKNLKTGKYAKM

SEQ ID NO: 13171 - protein, 15 aa, HUMAN IMMUNODEFICIENCY VIRUS
ATDIQTKELQKQITK

SEQ ID NO: 13172 - protein, 15 aa, HUMAN IMMUNODEFICIENCY VIRUS
IRDYGKQMAGDDCVA

SEQ ID NO: 13173 - protein, 15 aa, HUMAN IMMUNODEFICIENCY VIRUS
HSNWRAMASDFNLPP

SEQ ID NO: 13174 - protein, 15 aa, HUMAN IMMUNODEFICIENCY VIRUS
EGKISKIGPENPYNT

SEQ ID NO: 13175 - protein, 15 aa, HUMAN IMMUNODEFICIENCY VIRUS
RNLLTQIGCTLNFPI

SEQ ID NO: 13176 - protein, 15 aa, HUMAN IMMUNODEFICIENCY VIRUS
ALGIIQAQPDKSESE

SEQ ID NO: 13177 - protein, 15 aa, HUMAN IMMUNODEFICIENCY VIRUS
PIVLPEKDSWTVNDI

SEQ ID NO: 13178 - protein, 15 aa, HUMAN IMMUNODEFICIENCY VIRUS
PAIFQSSMTKILEPF

SEQ ID NO: 13179 - protein, 15 aa, HUMAN IMMUNODEFICIENCY VIRUS
YTAFTIPSINNETPG

SEQ ID NO: 13180 - protein, 15 aa, HUMAN IMMUNODEFICIENCY VIRUS
SPAIFQSSMTKILEP

SEQ ID NO: 13181 - protein, 15 aa, HUMAN IMMUNODEFICIENCY VIRUS
VSQIIEQLIKKEKVY

SEQ ID NO: 13182 - protein, 15 aa, HUMAN IMMUNODEFICIENCY VIRUS
KVYLSWVPAHKGIGG

SEQ ID NO: 13183 - protein, 15 aa, HUMAN IMMUNODEFICIENCY VIRUS
EKVYLSWVPAHKGIG

SEQ ID NO: 13184 - protein, 15 aa, HUMAN IMMUNODEFICIENCY VIRUS
FRKYTAFTIPSINNE

SEQ ID NO: 13185 - protein, 15 aa, HUMAN IMMUNODEFICIENCY VIRUS
IIDIIATDIQTKELQ

SEQ ID NO: 13186 - protein, 15 aa, HUMAN IMMUNODEFICIENCY VIRUS
RDPIWKGPAKLLWKG

SEQ ID NO: 13187 - protein, 15 aa, HUMAN IMMUNODEFICIENCY VIRUS
TKELQKQITKIQNFR

SEQ ID NO: 13188 - protein, 15 aa, HUMAN IMMUNODEFICIENCY VIRUS
GGQLKEALLDTGADD

SEQ ID NO: 13189 - protein, 15 aa, HUMAN IMMUNODEFICIENCY VIRUS
KEKVYLSWVPAHKGI

SEQ ID NO: 13190 - protein, 15 aa, HUMAN IMMUNODEFICIENCY VIRUS
TAYFILKLAGRWPVK

SEQ ID NO: 13191 - protein, 15 aa, HUMAN IMMUNODEFICIENCY VIRUS
CTHLEGKIILVAVHV

SEQ ID NO: 13192 - protein, 15 aa, HUMAN IMMUNODEFICIENCY VIRUS
ETAYFILKLAGRWPV

SEQ ID NO: 13193 - protein, 15 aa, HUMAN IMMUNODEFICIENCY VIRUS
EGKIILVAVHVASGY

SEQ ID NO: 13194 - protein, 15 aa, HUMAN IMMUNODEFICIENCY VIRUS
SIVIWGKTPKFRLPI

SEQ ID NO: 13195 - protein, 15 aa, HUMAN IMMUNODEFICIENCY VIRUS
ILKLAGRWPVKVIHT

SEQ ID NO: 13196 - protein, 15 aa, HUMAN IMMUNODEFICIENCY VIRUS
LPPVVAKEIVASCDK

SEQ ID NO: 13197 - protein, 15 aa, HUMAN IMMUNODEFICIENCY VIRUS
ERIIDIIATDIQTKE

SEQ ID NO: 13198 - protein, 15 aa, HUMAN IMMUNODEFICIENCY VIRUS
GERIIDIIATDIQTK

SEQ ID NO: 13199 - protein, 15 aa, HUMAN IMMUNODEFICIENCY VIRUS
PVNIIGRNMLTQIGC

SEQ ID NO: 13200 - protein, 15 aa, HUMAN IMMUNODEFICIENCY VIRUS
YAGIKVKQLCKLLRG

SEQ ID NO: 13201 - protein, 15 aa, HUMAN IMMUNODEFICIENCY VIRUS
NEQVDKLVSSGIRKV

SEQ ID NO: 13202 - protein, 15 aa, HUMAN IMMUNODEFICIENCY VIRUS
KEPIVGAETFYVDGA

SEQ ID NO: 13203 - protein, 15 aa, HUMAN IMMUNODEFICIENCY VIRUS
DFNLPPVVAKEIVAS

SEQ ID NO: 13204 - protein, 15 aa, HUMAN IMMUNODEFICIENCY VIRUS
PDKWTVQPIQLPEKD

SEQ ID NO: 13205 - protein, 15 aa, HUMAN IMMUNODEFICIENCY VIRUS
ASDFNLPPVVAKEIV

SEQ ID NO: 13206 - protein, 15 aa, HUMAN IMMUNODEFICIENCY VIRUS
GSNFTSAAVKAACWW

SEQ ID NO: 13207 - protein, 15 aa, HUMAN IMMUNODEFICIENCY VIRUS
AIHLALQDSGLEVNI

SEQ ID NO: 13208 - protein, 15 aa, HUMAN IMMUNODEFICIENCY VIRUS
DFNLPPIVAKEIVAS

SEQ ID NO: 13209 - protein, 15 aa, HUMAN IMMUNODEFICIENCY VIRUS
HLALQDSGLEVNIVT

SEQ ID NO: 13210 - protein, 15 aa, HUMAN IMMUNODEFICIENCY VIRUS
ASDFNLPPIVAKEIV

SEQ ID NO: 13211 - protein, 15 aa, HUMAN IMMUNODEFICIENCY VIRUS
DLEIGQHRAKIEELR

SEQ ID NO: 13212 - protein, 15 aa, HUMAN IMMUNODEFICIENCY VIRUS
PVNIIGRNLLTQIGC

SEQ ID NO: 13213 - protein, 15 aa, HUMAN IMMUNODEFICIENCY VIRUS
DSGLEVNIVTDSQYA

SEQ ID NO: 13214 - protein, 15 aa, HUMAN IMMUNODEFICIENCY VIRUS
CKLLRGAKALTDIVP

SEQ ID NO: 13215 - protein, 15 aa, HUMAN IMMUNODEFICIENCY VIRUS
VDKLVSSGIRKVLFL

SEQ ID NO: 13216 - protein, 15 aa, HUMAN IMMUNODEFICIENCY VIRUS
TAYFLLKLAGRWPVK

SEQ ID NO: 13217 - protein, 15 aa, HUMAN IMMUNODEFICIENCY VIRUS
AIHLALQDSGSEVNI

SEQ ID NO: 13218 - protein, 15 aa, HUMAN IMMUNODEFICIENCY VIRUS
HLALQDSGSEVNIVT

SEQ ID NO: 13219 - protein, 15 aa, HUMAN IMMUNODEFICIENCY VIRUS
RWPVKVIHTDNGSNF

SEQ ID NO: 13220 - protein, 15 aa, HUMAN IMMUNODEFICIENCY VIRUS
AGRWPVKVIHTDNGS

SEQ ID NO: 13221 - protein, 15 aa, HUMAN IMMUNODEFICIENCY VIRUS
ETAYFLLKLAGRWPV

SEQ ID NO: 13222 - protein, 15 aa, HUMAN IMMUNODEFICIENCY VIRUS
LIEICGKKAIGTVLV

SEQ ID NO: 13223 - protein, 15 aa, HUMAN IMMUNODEFICIENCY VIRUS
LPPIVAKEIVASCDK

SEQ ID NO: 13224 - protein, 15 aa, HUMAN IMMUNODEFICIENCY VIRUS
QHLLRWGFTTPDKKH

SEQ ID NO: 13225 - protein, 15 aa, HUMAN IMMUNODEFICIENCY VIRUS
CTHLEGKVILVAVHV

SEQ ID NO: 13226 - protein, 15 aa, HUMAN IMMUNODEFICIENCY VIRUS
EHLLKWGFTTPDKKH

SEQ ID NO: 13227 - protein, 15 aa, HUMAN IMMUNODEFICIENCY VIRUS
EGKVILVAVHVASGY

SEQ ID NO: 13228 - protein, 15 aa, HUMAN IMMUNODEFICIENCY VIRUS
KVYLAWVPAHKGIGG

SEQ ID NO: 13229 - protein, 15 aa, HUMAN IMMUNODEFICIENCY VIRUS
VRQYDQILIEICGKK

SEQ ID NO: 13230 - protein, 15 aa, HUMAN IMMUNODEFICIENCY VIRUS
EKVYLAWVPAHKGIG

SEQ ID NO: 13231 - protein, 15 aa, HUMAN IMMUNODEFICIENCY VIRUS
DLEIGQHRTKIEELR

SEQ ID NO: 13232 - protein, 15 aa, HUMAN IMMUNODEFICIENCY VIRUS
VNIIGRNLLTQIGCT

SEQ ID NO: 13233 - protein, 15 aa, HUMAN IMMUNODEFICIENCY VIRUS
QITLWQRPLVTIKIG

SEQ ID NO: 13234 - protein, 15 aa, HUMAN IMMUNODEFICIENCY VIRUS
QKVVSLTETTNQKTE

SEQ ID NO: 13235 - protein, 15 aa, HUMAN IMMUNODEFICIENCY VIRUS
KEKVYLAWVPAHKGI

SEQ ID NO: 13236 - protein, 15 aa, HUMAN IMMUNODEFICIENCY VIRUS
LIEICGHKAIGTVLV

SEQ ID NO: 13237 - protein, 15 aa, HUMAN IMMUNODEFICIENCY VIRUS
CKLLRGTKALTEVIP

SEQ ID NO: 13238 - protein, 15 aa, HUMAN IMMUNODEFICIENCY VIRUS
ESELVNQIIEQLIKK

SEQ ID NO: 13239 - protein, 15 aa, HUMAN IMMUNODEFICIENCY VIRUS
ESELVSQIIEQLIKK

SEQ ID NO: 13240 - protein, 15 aa, HUMAN IMMUNODEFICIENCY VIRUS
GDAYFSVPLDKDFRK

SEQ ID NO: 13241 - protein, 15 aa, HUMAN IMMUNODEFICIENCY VIRUS
VNIIGRNMLTQIGCT

SEQ ID NO: 13242 - protein, 15 aa, HUMAN IMMUNODEFICIENCY VIRUS
YPGIKVRQLCKLLRG

SEQ ID NO: 13243 - protein, 15 aa, HUMAN IMMUNODEFICIENCY VIRUS
RDPLWKGPAKLLWKG

SEQ ID NO: 13244 - protein, 15 aa, HUMAN IMMUNODEFICIENCY VIRUS
QITLWQRPLVTVKIG

SEQ ID NO: 13245 - protein, 15 aa, HUMAN IMMUNODEFICIENCY VIRUS
SQIYAGIKVKQLCKL

SEQ ID NO: 13246 - protein, 15 aa, HUMAN IMMUNODEFICIENCY VIRUS
SIVIWGKTPKFKLPI

SEQ ID NO: 13247 - protein, 15 aa, HUMAN IMMUNODEFICIENCY VIRUS
IEELREHLLKWGFTT

SEQ ID NO: 13248 - protein, 15 aa, HUMAN IMMUNODEFICIENCY VIRUS
KWTVQPIQLPEKDSW

SEQ ID NO: 13249 - protein, 15 aa, HUMAN IMMUNODEFICIENCY VIRUS
ITLWQRPLVTIKIGG

SEQ ID NO: 13250 - protein, 15 aa, HUMAN IMMUNODEFICIENCY VIRUS
ALGIIQAQPDRSESE

SEQ ID NO: 13251 - protein, 15 aa, HUMAN IMMUNODEFICIENCY VIRUS
KTELQAIHLALQDSG

SEQ ID NO: 13252 - protein, 15 aa, HUMAN IMMUNODEFICIENCY VIRUS
IKALVEICTEMEKEG

SEQ ID NO: 13253 - protein, 15 aa, HUMAN IMMUNODEFICIENCY VIRUS
IEELRQHLLRWGFTT

SEQ ID NO: 13254 - protein, 15 aa, HUMAN IMMUNODEFICIENCY VIRUS
RNMLTQLGCTLNFPI

SEQ ID NO: 13255 - protein, 15 aa, HUMAN IMMUNODEFICIENCY VIRUS
VDKLVSAGIRKVLFL

SEQ ID NO: 13256 - protein, 15 aa, HUMAN IMMUNODEFICIENCY VIRUS
NEQVDKLVSAGIRKV

SEQ ID NO: 13257 - protein, 15 aa, HUMAN IMMUNODEFICIENCY VIRUS
SQIYPGIKVRQLCKL

SEQ ID NO: 13258 - protein, 15 aa, HUMAN IMMUNODEFICIENCY VIRUS
LEPFRKQNPDIVIYQ

SEQ ID NO: 13259 - protein, 15 aa, HUMAN IMMUNODEFICIENCY VIRUS
TVSFSFPQITLWQRP

SEQ ID NO: 13260 - protein, 15 aa, HUMAN IMMUNODEFICIENCY VIRUS
GSNFTSTTVKAACWW

SEQ ID NO: 13261 - protein, 15 aa, HUMAN IMMUNODEFICIENCY VIRUS
IIDIIASDIQTKELQ

SEQ ID NO: 13262 - protein, 15 aa, HUMAN IMMUNODEFICIENCY VIRUS
LLKLAGRWPVKTIHT

SEQ ID NO: 13263 - protein, 15 aa, HUMAN IMMUNODEFICIENCY VIRUS
TEAVQKIATESIVIW

SEQ ID NO: 13264 - protein, 15 aa, HUMAN IMMUNODEFICIENCY VIRUS
YTAFTIPSTNNETPG

SEQ ID NO: 13265 - protein, 15 aa, HUMAN IMMUNODEFICIENCY VIRUS
DTVLEDINLPGKWKP

SEQ ID NO: 13266 - protein, 15 aa, HUMAN IMMUNODEFICIENCY VIRUS
AKALTDIVPLTEEAE

SEQ ID NO: 13267 - protein, 15 aa, HUMAN IMMUNODEFICIENCY VIRUS
QRPLVTIKIGGQLKE

SEQ ID NO: 13268 - protein, 15 aa, HUMAN IMMUNODEFICIENCY VIRUS
YARMRGAHTNDVKQL

SEQ ID NO: 13269 - protein, 15 aa, HUMAN IMMUNODEFICIENCY VIRUS
RWPVKTIHTDNGSNF

SEQ ID NO: 13270 - protein, 15 aa, HUMAN IMMUNODEFICIENCY VIRUS
KWTVQPIVLPEKDSW

SEQ ID NO: 13271 - protein, 15 aa, HUMAN IMMUNODEFICIENCY VIRUS
AGRWPVKTIHTDNGS

SEQ ID NO: 13272 - protein, 15 aa, HUMAN IMMUNODEFICIENCY VIRUS
ITLWQRPLVTVKIGG

SEQ ID NO: 13273 - protein, 15 aa, HUMAN IMMUNODEFICIENCY VIRUS
PDKWTVQPIVLPEKD

SEQ ID NO: 13274 - protein, 15 aa, HUMAN IMMUNODEFICIENCY VIRUS
FRKYTAFTIPSTNNE

SEQ ID NO: 13275 - protein, 15 aa, HUMAN IMMUNODEFICIENCY VIRUS
ERIIDIIASDIQTKE

SEQ ID NO: 13276 - protein, 15 aa, HUMAN IMMUNODEFICIENCY VIRUS
GERIIDIIASDIQTK

SEQ ID NO: 13277 - protein, 15 aa, HUMAN IMMUNODEFICIENCY VIRUS
GERIVDIIATDIQTK

SEQ ID NO: 13278 - protein, 15 aa, HUMAN IMMUNODEFICIENCY VIRUS
DTVLEEINLPGKWKP

SEQ ID NO: 13279 - protein, 15 aa, HUMAN IMMUNODEFICIENCY VIRUS
KTELQAIYLALQDSG

SEQ ID NO: 13280 - protein, 15 aa, HUMAN IMMUNODEFICIENCY VIRUS
TKELQKQIIKIQNFR

SEQ ID NO: 13281 - protein, 15 aa, HUMAN IMMUNODEFICIENCY VIRUS
ERIVDIIATDIQTKE

SEQ ID NO: 13282 - protein, 15 aa, HUMAN IMMUNODEFICIENCY VIRUS
VRQYDQIPIEICGKK

SEQ ID NO: 13283 - protein, 15 aa, HUMAN IMMUNODEFICIENCY VIRUS
VPTFNFPQITLWQRP

SEQ ID NO: 13284 - protein, 15 aa, HUMAN IMMUNODEFICIENCY VIRUS
VNIIGRNMLTQLGCT

SEQ ID NO: 13285 - protein, 15 aa, HUMAN IMMUNODEFICIENCY VIRUS
EGKISRIGPENPYNT

SEQ ID NO: 13286 - protein, 15 aa, HUMAN IMMUNODEFICIENCY VIRUS
TKALTEVIPLTEEAE

SEQ ID NO: 13287 - protein, 15 aa, HUMAN IMMUNODEFICIENCY VIRUS
KIAMESIVIWGKTPK

SEQ ID NO: 13288 - protein, 15 aa, HUMAN IMMUNODEFICIENCY VIRUS
IKVVPRRKVKIIRDY

SEQ ID NO: 13289 - protein, 15 aa, HUMAN IMMUNODEFICIENCY VIRUS
QGTVSFSFPQITLWQ

SEQ ID NO: 13290 - protein, 15 aa, HUMAN IMMUNODEFICIENCY VIRUS
VKLWYQLETEPIVGA

SEQ ID NO: 13291 - protein, 15 aa, HUMAN IMMUNODEFICIENCY VIRUS
SQIYPGIKVKQLCKL

SEQ ID NO: 13292 - protein, 15 aa, HUMAN IMMUNODEFICIENCY VIRUS
NLAFPQGEAREFPPE

SEQ ID NO: 13293 - protein, 15 aa, HUMAN IMMUNODEFICIENCY VIRUS
GGQLIEALLDTGADD

SEQ ID NO: 13294 - protein, 15 aa, HUMAN IMMUNODEFICIENCY VIRUS
QKVVSLTDTTNQKTE

SEQ ID NO: 13295 - protein, 15 aa, HUMAN IMMUNODEFICIENCY VIRUS
KETWETWWTDYWQAT

SEQ ID NO: 13296 - protein, 15 aa, HUMAN IMMUNODEFICIENCY VIRUS
TGKYAKMRTAHTNDV

SEQ ID NO: 13297 - protein, 15 aa, HUMAN IMMUNODEFICIENCY VIRUS
QEPYKNLKTGKYARM

SEQ ID NO: 13298 - protein, 15 aa, HUMAN IMMUNODEFICIENCY VIRUS
PVPLQLPPLERLTLD

SEQ ID NO: 13299 - protein, 15 aa, HUMAN IMMUNODEFICIENCY VIRUS
AEPVPLQLPPLERLT

SEQ ID NO: 13300 - protein, 15 aa, HUMAN IMMUNODEFICIENCY VIRUS
IKFLYQSNPPPSPEG

SEQ ID NO: 13301 - protein, 15 aa, HUMAN IMMUNODEFICIENCY VIRUS
LKAVRIIKILYQSNP

SEQ ID NO: 13302 - protein, 15 aa, HUMAN IMMUNODEFICIENCY VIRUS
KFLYQSNPPPSPEGT

SEQ ID NO: 13303 - protein, 15 aa, HUMAN IMMUNODEFICIENCY VIRUS
PVPLQLPPIERLRLD

SEQ ID NO: 13304 - protein, 15 aa, HUMAN IMMUNODEFICIENCY VIRUS
AEPVPLQLPPIERLR

SEQ ID NO: 13305 - protein, 15 aa, HUMAN IMMUNODEFICIENCY VIRUS
LEPWNHPGSQPKTAC

SEQ ID NO: 13306 - protein, 15 aa, HUMAN IMMUNODEFICIENCY VIRUS
QVCFLNKGLGISYGR

SEQ ID NO: 13307 - protein, 15 aa, HUMAN IMMUNODEFICIENCY VIRUS
LEPWKHPGSQPKTAC

SEQ ID NO: 13308 - protein, 15 aa, HUMAN IMMUNODEFICIENCY VIRUS
NNCYCKKCCFHCQVC

SEQ ID NO: 13309 - protein, 15 aa, HUMAN IMMUNODEFICIENCY VIRUS
TNCYCKKCCYHCQVC

SEQ ID NO: 13310 - protein, 15 aa, HUMAN IMMUNODEFICIENCY VIRUS
LEPWNHPGSQPTTAC

SEQ ID NO: 13311 - protein, 15 aa, HUMAN IMMUNODEFICIENCY VIRUS
WQVMIVWQVDRMRIR

SEQ ID NO: 13312 - protein, 15 aa, HUMAN IMMUNODEFICIENCY VIRUS
ENRWQVMIVWQVDRM

SEQ ID NO: 13313 - protein, 15 aa, HUMAN IMMUNODEFICIENCY VIRUS
MIVWQVDRMRIRTWK

SEQ ID NO: 13314 - protein, 15 aa, HUMAN IMMUNODEFICIENCY VIRUS
VGSLQYLALTALIKP

SEQ ID NO: 13315 - protein, 15 aa, HUMAN IMMUNODEFICIENCY VIRUS
DWHLGHGVSIEWRLR

SEQ ID NO: 13316 - protein, 15 aa, HUMAN IMMUNODEFICIENCY VIRUS
VWQVDRMRIRTWNSL

SEQ ID NO: 13317 - protein, 15 aa, HUMAN IMMUNODEFICIENCY VIRUS
HLYYFDCFSESAIRN

SEQ ID NO: 13318 - protein, 15 aa, HUMAN IMMUNODEFICIENCY VIRUS
ITTYWGLHTGERDWH

SEQ ID NO: 13319 - protein, 15 aa, HUMAN IMMUNODEFICIENCY VIRUS
RMRIRTWNSLVKHHM

SEQ ID NO: 13320 - protein, 15 aa, HUMAN IMMUNODEFICIENCY VIRUS
DWHLGQGVSIEWRKK

SEQ ID NO: 13321 - protein, 15 aa, HUMAN IMMUNODEFICIENCY VIRUS
WNSLVKHHMYVSKKA

SEQ ID NO: 13322 - protein, 15 aa, HUMAN IMMUNODEFICIENCY VIRUS
EVHIPLGEARLVVRT

SEQ ID NO: 13323 - protein, 15 aa, HUMAN IMMUNODEFICIENCY VIRUS
WKSLVKHHMYISGKA

SEQ ID NO: 13324 - protein, 15 aa, HUMAN IMMUNODEFICIENCY VIRUS
SLQYLALTALIKPKK

SEQ ID NO: 13325 - protein, 15 aa, HUMAN IMMUNODEFICIENCY VIRUS
RMRIRTWKSLVKHHM

SEQ ID NO: 13326 - protein, 15 aa, HUMAN IMMUNODEFICIENCY VIRUS
DPDLADQLIHLYYFD

SEQ ID NO: 13327 - protein, 15 aa, HUMAN IMMUNODEFICIENCY VIRUS
LQYLALTALIKPKKI

SEQ ID NO: 13328 - protein, 15 aa, HUMAN IMMUNODEFICIENCY VIRUS
STQVDPGLADQLIHL

SEQ ID NO: 13329 - protein, 15 aa, HUMAN IMMUNODEFICIENCY VIRUS
LIHLYYFDCFSESAI

SEQ ID NO: 13330 - protein, 15 aa, HUMAN IMMUNODEFICIENCY VIRUS
FDCFSESAIRKAILG

SEQ ID NO: 13331 - protein, 15 aa, HUMAN IMMUNODEFICIENCY VIRUS
EPGLADQLIHMHYFD

SEQ ID NO: 13332 - protein, 15 aa, HUMAN IMMUNODEFICIENCY VIRUS
LIVWQVDRMKIRTWN

SEQ ID NO: 13333 - protein, 15 aa, HUMAN IMMUNODEFICIENCY VIRUS
FDCFSDSAIRKAILG

SEQ ID NO: 13334 - protein, 15 aa, HUMAN IMMUNODEFICIENCY VIRUS
FDCFSESAIRNAILG

SEQ ID NO: 13335 - protein, 15 aa, HUMAN IMMUNODEFICIENCY VIRUS
LGHIVSPRCEYQAGH

SEQ ID NO: 13336 - protein, 15 aa, HUMAN IMMUNODEFICIENCY VIRUS
VGSLQYLALAALITP

SEQ ID NO: 13337 - protein, 15 aa, HUMAN IMMUNODEFICIENCY VIRUS
VWQVDRMKIRTWNSL

SEQ ID NO: 13338 - protein, 15 aa, HUMAN IMMUNODEFICIENCY VIRUS
IKTYWGLQTGERDWH

SEQ ID NO: 13339 - protein, 15 aa, HUMAN IMMUNODEFICIENCY VIRUS
EVHIPLGDARLVITT

SEQ ID NO: 13340 - protein, 15 aa, HUMAN IMMUNODEFICIENCY VIRUS
VGSLQYLALKALVTP

SEQ ID NO: 13341 - protein, 15 aa, HUMAN IMMUNODEFICIENCY VIRUS
MIVWQVDRMRINTWK

SEQ ID NO: 13342 - protein, 15 aa, HUMAN IMMUNODEFICIENCY VIRUS
TALIKPKKIKPPLPS

SEQ ID NO: 13343 - protein, 15 aa, HUMAN IMMUNODEFICIENCY VIRUS
VWQVDRMRINTWKSL

SEQ ID NO: 13344 - protein, 15 aa, HUMAN IMMUNODEFICIENCY VIRUS
HFRIGCQHSRIGITR

SEQ ID NO: 13345 - protein, 15 aa, HUMAN IMMUNODEFICIENCY VIRUS
YNEWTLELLEELKSE

SEQ ID NO: 13346 - protein, 15 aa, HUMAN IMMUNODEFICIENCY VIRUS
IIRILQQLLFIHFRI

SEQ ID NO: 13347 - protein, 15 aa, HUMAN IMMUNODEFICIENCY VIRUS
QLLFIHFRIGCQHSR

SEQ ID NO: 13348 - protein, 15 aa, HUMAN IMMUNODEFICIENCY VIRUS
REPYNEWTLELLEEL

SEQ ID NO: 13349 - protein, 15 aa, HUMAN IMMUNODEFICIENCY VIRUS
VRHFPRPWLHGLGQH

SEQ ID NO: 13350 - protein, 15 aa, HUMAN IMMUNODEFICIENCY VIRUS
GDTWEGVEAIIRILQ

SEQ ID NO: 13351 - protein, 15 aa, HUMAN IMMUNODEFICIENCY VIRUS
LELLEELKSEAVRHF

SEQ ID NO: 13352 - protein, 15 aa, HUMAN IMMUNODEFICIENCY VIRUS
GDTWAGVEAIIRILQ

SEQ ID NO: 13353 - protein, 15 aa, HUMAN IMMUNODEFICIENCY VIRUS
YETYGDTWAGVEAII

SEQ ID NO: 13354 - protein, 15 aa, HUMAN IMMUNODEFICIENCY VIRUS
HFRIGCRHSRIGITR

SEQ ID NO: 13355 - protein, 15 aa, HUMAN IMMUNODEFICIENCY VIRUS
QLLFIHFRIGCRHSR

SEQ ID NO: 13356 - protein, 15 aa, HUMAN IMMUNODEFICIENCY VIRUS
QLLFVHFRIGCQHSR

SEQ ID NO: 13357 - protein, 15 aa, HUMAN IMMUNODEFICIENCY VIRUS
YETYGDTWTGVEAII

SEQ ID NO: 13358 - protein, 15 aa, HUMAN IMMUNODEFICIENCY VIRUS
VRHFPRIWLHSLGQH

SEQ ID NO: 13359 - protein, 15 aa, HUMAN IMMUNODEFICIENCY VIRUS
YNEWALELLEELKNE

SEQ ID NO: 13360 - protein, 15 aa, HUMAN IMMUNODEFICIENCY VIRUS
EEWLVTLLSSSKLDQ

SEQ ID NO: 13361 - protein, 15 aa, HUMAN IMMUNODEFICIENCY VIRUS
EWLVTLLSSSKLDQG

SEQ ID NO: 13362 - protein, 15 aa, HUMAN IMMUNODEFICIENCY VIRUS
VVAIIAIVVWTIVFI

SEQ ID NO: 13363 - protein, 15 aa, HUMAN IMMUNODEFICIENCY VIRUS
LAKVDYRIVIVAFIV

SEQ ID NO: 13364 - protein, 15 aa, HUMAN IMMUNODEFICIENCY VIRUS
RKILRQRKIDRLIDR

SEQ ID NO: 13365 - protein, 15 aa, HUMAN IMMUNODEFICIENCY VIRUS
IIAIVVWTIVFIEYR

SEQ ID NO: 13366 - protein, 15 aa, HUMAN IMMUNODEFICIENCY VIRUS
IAIVVWTIVFIEYRK

SEQ ID NO: 13367 - protein, 15 aa, HUMAN IMMUNODEFICIENCY VIRUS
IVFIEYRKILRQRKI

SEQ ID NO: 13368 - protein, 15 aa, HUMAN IMMUNODEFICIENCY VIRUS
SLYILAIVALVVAII

SEQ ID NO: 13369 - protein, 15 aa, HUMAN IMMUNODEFICIENCY VIRUS
IVVWTIVFIEYRKIL

SEQ ID NO: 13370 - protein, 15 aa, HUMAN IMMUNODEFICIENCY VIRUS
LQILAIVALVVAGII

SEQ ID NO: 13371 - protein, 15 aa, HUMAN IMMUNODEFICIENCY VIRUS
HACVPTDPNPQEVVL

SEQ ID NO: 13372 - protein, 15 aa, HUMAN IMMUNODEFICIENCY VIRUS
VERYLKDQQLLGIWG

SEQ ID NO: 13373 - protein, 15 aa, HUMAN IMMUNODEFICIENCY VIRUS
VEQMHEDIISLWDQS

SEQ ID NO: 13374 - protein, 15 aa, HUMAN IMMUNODEFICIENCY VIRUS
CPKVSFEPIPIHYCA

SEQ ID NO: 13375 - protein, 15 aa, HUMAN IMMUNODEFICIENCY VIRUS
ARVLAVERYLKDQQL

SEQ ID NO: 13376 - protein, 15 aa, HUMAN IMMUNODEFICIENCY VIRUS
YKVVKIEPLGVAPTK

SEQ ID NO: 13377 - protein, 15 aa, HUMAN IMMUNODEFICIENCY VIRUS
GVPVWKEATTTLFCA

SEQ ID NO: 13378 - protein, 15 aa, HUMAN IMMUNODEFICIENCY VIRUS
FLALAWDDLRSLCLF

SEQ ID NO: 13379 - protein, 15 aa, HUMAN IMMUNODEFICIENCY VIRUS
IYTLIEESQNQQEKN

SEQ ID NO: 13380 - protein, 15 aa, HUMAN IMMUNODEFICIENCY VIRUS
GLRLGWEGLKYLWNL

SEQ ID NO: 13381 - protein, 15 aa, HUMAN IMMUNODEFICIENCY VIRUS
QELLELDKWASLWNW

SEQ ID NO: 13382 - protein, 15 aa, HUMAN IMMUNODEFICIENCY VIRUS
VERYLRDQQLLGIWG

SEQ ID NO: 13383 - protein, 15 aa, HUMAN IMMUNODEFICIENCY VIRUS
IINMWQEVGKAMYAP

SEQ ID NO: 13384 - protein, 15 aa, HUMAN IMMUNODEFICIENCY VIRUS
PEGIEEEGGERDRDR

SEQ ID NO: 13385 - protein, 15 aa, HUMAN IMMUNODEFICIENCY VIRUS
INEMNNENNGTNSTW

SEQ ID NO: 13386 - protein, 15 aa, HUMAN IMMUNODEFICIENCY VIRUS
LGRIEEEGGEQDKNR

SEQ ID NO: 13387 - protein, 15 aa, HUMAN IMMUNODEFICIENCY VIRUS
NGSLAEEEVVIRSEN

SEQ ID NO: 13388 - protein, 15 aa, HUMAN IMMUNODEFICIENCY VIRUS
QDLLALDKWASLWNW

SEQ ID NO: 13389 - protein, 15 aa, HUMAN IMMUNODEFICIENCY VIRUS
ARVLAVERYLRDQQL

SEQ ID NO: 13390 - protein, 15 aa, HUMAN IMMUNODEFICIENCY VIRUS
EIIIRSENLTNNVKT

SEQ ID NO: 13391 - protein, 15 aa, HUMAN IMMUNODEFICIENCY VIRUS
MTWMEWEREIDNYTS

SEQ ID NO: 13392 - protein, 15 aa, HUMAN IMMUNODEFICIENCY VIRUS
KETINEEAAEWDRLH

SEQ ID NO: 13393 - protein, 15 aa, HUMAN IMMUNODEFICIENCY VIRUS
EKAFSPEVIPMFSAL

SEQ ID NO: 13394 - protein, 15 aa, HUMAN IMMUNODEFICIENCY VIRUS
KARVLAEAMSQVTNS

SEQ ID NO: 13395 - protein, 15 aa, HUMAN IMMUNODEFICIENCY VIRUS
AMQMLKDTINEEAAE

SEQ ID NO: 13396 - protein, 15 aa, HUMAN IMMUNODEFICIENCY VIRUS
WVKVVEEKAFSPEVI

SEQ ID NO: 13397 - protein, 15 aa, HUMAN IMMUNODEFICIENCY VIRUS
FKTLRAEQATQEVKN

SEQ ID NO: 13398 - protein, 15 aa, HUMAN IMMUNODEFICIENCY VIRUS
AMQMLKETINEEAAE

SEQ ID NO: 13399 - protein, 15 aa, HUMAN IMMUNODEFICIENCY VIRUS
WVKVIEEKAFSPEVI

SEQ ID NO: 13400 - protein, 15 aa, HUMAN IMMUNODEFICIENCY VIRUS
KARVLAEAMSQASGA

SEQ ID NO: 13401 - protein, 15 aa, HUMAN IMMUNODEFICIENCY VIRUS
LDKIEEEQNKSKKKA

SEQ ID NO: 13402 - protein, 15 aa, HUMAN IMMUNODEFICIENCY VIRUS
FKTLRAEQATQDVKN

SEQ ID NO: 13403 - protein, 15 aa, HUMAN IMMUNODEFICIENCY VIRUS
YKTLRAEQASQEVKN

SEQ ID NO: 13404 - protein, 15 aa, HUMAN IMMUNODEFICIENCY VIRUS
TQGYFPDWQNYTPGP

SEQ ID NO: 13405 - protein, 15 aa, HUMAN IMMUNODEFICIENCY VIRUS
LSHFLKEKGGLEGLI

SEQ ID NO: 13406 - protein, 15 aa, HUMAN IMMUNODEFICIENCY VIRUS
LSFFLKEKGGLDGLI

SEQ ID NO: 13407 - protein, 15 aa, HUMAN IMMUNODEFICIENCY VIRUS
TQGFFPDWQNYTPGP

SEQ ID NO: 13408 - protein, 15 aa, HUMAN IMMUNODEFICIENCY VIRUS
VGAVSRDLEKHGAIT

SEQ ID NO: 13409 - protein, 15 aa, HUMAN IMMUNODEFICIENCY VIRUS
IYQYMDDLYVGSDLE

SEQ ID NO: 13410 - protein, 15 aa, HUMAN IMMUNODEFICIENCY VIRUS
ISKIGPENPYNTPVF

SEQ ID NO: 13411 - protein, 15 aa, HUMAN IMMUNODEFICIENCY VIRUS
GYELHPDKWTVQPIQ

SEQ ID NO: 13412 - protein, 15 aa, HUMAN IMMUNODEFICIENCY VIRUS
EVNIVTDSQYALGII

SEQ ID NO: 13413 - protein, 15 aa, HUMAN IMMUNODEFICIENCY VIRUS
AEVIPAETGQETAYF

SEQ ID NO: 13414 - protein, 15 aa, HUMAN IMMUNODEFICIENCY VIRUS
QWPLTEEKIKALTEI

SEQ ID NO: 13415 - protein, 15 aa, HUMAN IMMUNODEFICIENCY VIRUS
SGYIEAEVIPAETGQ

SEQ ID NO: 13416 - protein, 15 aa, HUMAN IMMUNODEFICIENCY VIRUS
RKVLFLDGIDKAQEE

SEQ ID NO: 13417 - protein, 15 aa, HUMAN IMMUNODEFICIENCY VIRUS
PPVVAKEIVASCDKC

SEQ ID NO: 13418 - protein, 15 aa, HUMAN IMMUNODEFICIENCY VIRUS
KCQLKGEAMHGQVDC

SEQ ID NO: 13419 - protein, 15 aa, HUMAN IMMUNODEFICIENCY VIRUS
DLYVGSDLEIGQHRA

SEQ ID NO: 13420 - protein, 15 aa, HUMAN IMMUNODEFICIENCY VIRUS
KAKIIRDYGKQMAGD

SEQ ID NO: 13421 - protein, 15 aa, HUMAN IMMUNODEFICIENCY VIRUS
WRAMASDFNLPPVVA

SEQ ID NO: 13422 - protein, 15 aa, HUMAN IMMUNODEFICIENCY VIRUS
AETFYVDGAANRETK

SEQ ID NO: 13423 - protein, 15 aa, HUMAN IMMUNODEFICIENCY VIRUS
VKVIHTDNGSNFTSA

SEQ ID NO: 13424 - protein, 15 aa, HUMAN IMMUNODEFICIENCY VIRUS
NREILKEPVHGVYYD

SEQ ID NO: 13425 - protein, 15 aa, HUMAN IMMUNODEFICIENCY VIRUS
TYQIYQEPFKNLKTG

SEQ ID NO: 13426 - protein, 15 aa, HUMAN IMMUNODEFICIENCY VIRUS
VHGVYYDPSKDLIAE

SEQ ID NO: 13427 - protein, 15 aa, HUMAN IMMUNODEFICIENCY VIRUS
KAGYVTDRGRQKVVS

SEQ ID NO: 13428 - protein, 15 aa, HUMAN IMMUNODEFICIENCY VIRUS
IVPLTEEAELELAEN

SEQ ID NO: 13429 - protein, 15 aa, HUMAN IMMUNODEFICIENCY VIRUS
GAVVIQDNSDIKVVP

SEQ ID NO: 13430 - protein, 15 aa, HUMAN IMMUNODEFICIENCY VIRUS
IDIIATDIQTKELQK

SEQ ID NO: 13431 - protein, 15 aa, HUMAN IMMUNODEFICIENCY VIRUS
IPSINNETPGIRYQY

SEQ ID NO: 13432 - protein, 15 aa, HUMAN IMMUNODEFICIENCY VIRUS
SKDLIAEIQKQGQGQ

SEQ ID NO: 13433 - protein, 15 aa, HUMAN IMMUNODEFICIENCY VIRUS
LVEICTEMEKEGKIS

SEQ ID NO: 13434 - protein, 15 aa, HUMAN IMMUNODEFICIENCY VIRUS
EPIVGAETFYVDGAA

SEQ ID NO: 13435 - protein, 15 aa, HUMAN IMMUNODEFICIENCY VIRUS
RLPIQKETWETWWTD

SEQ ID NO: 13436 - protein, 15 aa, HUMAN IMMUNODEFICIENCY VIRUS
WAGIKQEFGIPYNPQ

SEQ ID NO: 13437 - protein, 15 aa, HUMAN IMMUNODEFICIENCY VIRUS
GKQMAGDDCVAGRQD

SEQ ID NO: 13438 - protein, 15 aa, HUMAN IMMUNODEFICIENCY VIRUS
EQLIKKEKVYLAWVP

SEQ ID NO: 13439 - protein, 15 aa, HUMAN IMMUNODEFICIENCY VIRUS
GKQMAGDDCVASRQD

SEQ ID NO: 13440 - protein, 15 aa, HUMAN IMMUNODEFICIENCY VIRUS
YFSVPLDKDFRKYTA

SEQ ID NO: 13441 - protein, 15 aa, HUMAN IMMUNODEFICIENCY VIRUS
WAGIQQEFGIPYNPQ

SEQ ID NO: 13442 - protein, 15 aa, HUMAN IMMUNODEFICIENCY VIRUS
WYQLEKEPIVGAETF

SEQ ID NO: 13443 - protein, 15 aa, HUMAN IMMUNODEFICIENCY VIRUS
KLWYQLEKEPIVGAE

SEQ ID NO: 13444 - protein, 15 aa, HUMAN IMMUNODEFICIENCY VIRUS
KLPIQKETWEAWWTE

SEQ ID NO: 13445 - protein, 15 aa, HUMAN IMMUNODEFICIENCY VIRUS
AREFSSEQTRANSPT

SEQ ID NO: 13446 - protein, 15 aa, HUMAN IMMUNODEFICIENCY VIRUS
IDIIASDIQTKELQK

SEQ ID NO: 13447 - protein, 15 aa, HUMAN IMMUNODEFICIENCY VIRUS
VQKIATESIVIWGKT

SEQ ID NO: 13448 - protein, 15 aa, HUMAN IMMUNODEFICIENCY VIRUS
YDQILIEICGKKAIG

SEQ ID NO: 13449 - protein, 15 aa, HUMAN IMMUNODEFICIENCY VIRUS
DDTVLEEINLPGKWK

SEQ ID NO: 13450 - protein, 15 aa, HUMAN IMMUNODEFICIENCY VIRUS
EQLIKKEKVYLSWVP

SEQ ID NO: 13451 - protein, 15 aa, HUMAN IMMUNODEFICIENCY VIRUS
DDTVLEDINLPGKWK

SEQ ID NO: 13452 - protein, 15 aa, HUMAN IMMUNODEFICIENCY VIRUS
QPIVLPEKDSWTVND

SEQ ID NO: 13453 - protein, 15 aa, HUMAN IMMUNODEFICIENCY VIRUS
GAVVIQDNSEIKVVP

SEQ ID NO: 13454 - protein, 15 aa, HUMAN IMMUNODEFICIENCY VIRUS
KAKIIKDYGKQMAGA

SEQ ID NO: 13455 - protein, 15 aa, HUMAN IMMUNODEFICIENCY VIRUS
KEKVERETETDPAVQ

SEQ ID NO: 13456 - protein, 15 aa, HUMAN IMMUNODEFICIENCY VIRUS
VKKLTEDRWNKPQKT

SEQ ID NO: 13457 - protein, 15 aa, HUMAN IMMUNODEFICIENCY VIRUS
IHLYYFDCFSESAIR

SEQ ID NO: 13458 - protein, 15 aa, HUMAN IMMUNODEFICIENCY VIRUS
VQKLVEDRWNKPQKT

SEQ ID NO: 13459 - protein, 15 aa, HUMAN IMMUNODEFICIENCY VIRUS
STQIDPDLADQLIHL

SEQ ID NO: 13460 - protein, 15 aa, HUMAN IMMUNODEFICIENCY VIRUS
LEELKNEAVRHFPRP

SEQ ID NO: 13461 - protein, 15 aa, HUMAN IMMUNODEFICIENCY VIRUS
LEELKSEAVRHFPRI

SEQ ID NO: 13462 - protein, 15 aa, HUMAN IMMUNODEFICIENCY VIRUS
LGQYIYETYGDTWAG

SEQ ID NO: 13463 - protein, 15 aa, HUMAN IMMUNODEFICIENCY VIRUS
LEELKQEAVRHFPRP

SEQ ID NO: 13464 - protein, 15 aa, HUMAN IMMUNODEFICIENCY VIRUS
GGDMRDNWRSELYKY

SEQ ID NO: 13465 - protein, 15 aa, HUMAN IMMUNODEFICIENCY VIRUS
SITLTVQARQLLSGI

SEQ ID NO: 13466 - protein, 15 aa, HUMAN IMMUNODEFICIENCY VIRUS
LRAIEAQQHLLQLTV

SEQ ID NO: 13467 - protein, 15 aa, HUMAN IMMUNODEFICIENCY VIRUS
TGEIIGDIRQAHCNI

SEQ ID NO: 13468 - protein, 15 aa, HUMAN IMMUNODEFICIENCY VIRUS
RRVVEREKRAVGIGA

SEQ ID NO: 13469 - protein, 15 aa, HUMAN IMMUNODEFICIENCY VIRUS
KNNMVEQMHEDIISL

SEQ ID NO: 13470 - protein, 15 aa, HUMAN IMMUNODEFICIENCY VIRUS
LALAWDDLRSLCLFS

SEQ ID NO: 13471 - protein, 15 aa, HUMAN IMMUNODEFICIENCY VIRUS
GGDLEITTHSFNCRG

SEQ ID NO: 13472 - protein, 15 aa, HUMAN IMMUNODEFICIENCY VIRUS
AKAYDTEVHNVWATH

SEQ ID NO: 13473 - protein, 15 aa, HUMAN IMMUNODEFICIENCY VIRUS
IAVAEGTDRIIEVVQ

SEQ ID NO: 13474 - protein, 15 aa, HUMAN IMMUNODEFICIENCY VIRUS
RRVVQREKRAVGIGA

SEQ ID NO: 13475 - protein, 15 aa, HUMAN IMMUNODEFICIENCY VIRUS
IAVAEGTDRVIEVVQ

SEQ ID NO: 13476 - protein, 15 aa, HUMAN IMMUNODEFICIENCY VIRUS
LRAIEAQQHLLKLTV

SEQ ID NO: 13477 - protein, 15 aa, HUMAN IMMUNODEFICIENCY VIRUS
FAILKCNDKKFNGTG

SEQ ID NO: 13478 - protein, 15 aa, HUMAN IMMUNODEFICIENCY VIRUS
VQNANPDCKTILKAL

SEQ ID NO: 13479 - protein, 15 aa, HUMAN IMMUNODEFICIENCY VIRUS
VDRFYKTLRAEQASQ

SEQ ID NO: 13480 - protein, 15 aa, HUMAN IMMUNODEFICIENCY VIRUS
GPIAPGQMREPRGSD

SEQ ID NO: 13481 - protein, 15 aa, HUMAN IMMUNODEFICIENCY VIRUS
VDRFFKTLRAEQATQ

SEQ ID NO: 13482 - protein, 15 aa, HUMAN IMMUNODEFICIENCY VIRUS
LGKIWPSHKGRPGNF

SEQ ID NO: 13483 - protein, 15 aa, HUMAN IMMUNODEFICIENCY VIRUS
EGHLARNCRAPRKKG

SEQ ID NO: 13484 - protein, 15 aa, HUMAN IMMUNODEFICIENCY VIRUS
EGHIAKNCRAPRKKG

SEQ ID NO: 13485 - protein, 15 aa, HUMAN IMMUNODEFICIENCY VIRUS
AEQATQEVKNWMTET

SEQ ID NO: 13486 - protein, 15 aa, HUMAN IMMUNODEFICIENCY VIRUS
AEQATQDVKNWMTDT

SEQ ID NO: 13487 - protein, 15 aa, HUMAN IMMUNODEFICIENCY VIRUS
EGHIARNCRAPRKKG

SEQ ID NO: 13488 - protein, 15 aa, HUMAN IMMUNODEFICIENCY VIRUS
LGKIWPSNKGRPGNF

SEQ ID NO: 13489 - protein, 15 aa, HUMAN IMMUNODEFICIENCY VIRUS
VQNANPDCKSILRAL

SEQ ID NO: 13490 - protein, 15 aa, HUMAN IMMUNODEFICIENCY VIRUS
AEQASQEVKNWMTET

SEQ ID NO: 13491 - protein, 15 aa, HUMAN IMMUNODEFICIENCY VIRUS
LGKIWPSSKGRPGNF

SEQ ID NO: 13492 - protein, 15 aa, HUMAN IMMUNODEFICIENCY VIRUS
LDGLIYSKKRQEILD

SEQ ID NO: 13493 - protein, 15 aa, HUMAN IMMUNODEFICIENCY VIRUS
FKLVPVDPREVEEAN

SEQ ID NO: 13494 - protein, 15 aa, HUMAN IMMUNODEFICIENCY VIRUS
FHHMARELHPEYYKD

SEQ ID NO: 13495 - protein, 15 aa, HUMAN IMMUNODEFICIENCY VIRUS
FLWMGYELHPDKWTV

SEQ ID NO: 13496 - protein, 15 aa, HUMAN IMMUNODEFICIENCY VIRUS
MAVFIHNFKRKGGIG

SEQ ID NO: 13497 - protein, 15 aa, HUMAN IMMUNODEFICIENCY VIRUS
VESMNKELKKIIGQV

SEQ ID NO: 13498 - protein, 15 aa, HUMAN IMMUNODEFICIENCY VIRUS
LKKIIGQVRDQAEHL

SEQ ID NO: 13499 - protein, 15 aa, HUMAN IMMUNODEFICIENCY VIRUS
HEKYHSNWRAMASDF

SEQ ID NO: 13500 - protein, 15 aa, HUMAN IMMUNODEFICIENCY VIRUS
CTEMEKEGKISKIGP

SEQ ID NO: 13501 - protein, 15 aa, HUMAN IMMUNODEFICIENCY VIRUS
FRVYYRDSRDPIWKG

SEQ ID NO: 13502 - protein, 15 aa, HUMAN IMMUNODEFICIENCY VIRUS
DGAANRETKLGKAGY

SEQ ID NO: 13503 - protein, 15 aa, HUMAN IMMUNODEFICIENCY VIRUS
TIKIGGQLKEALLDT

SEQ ID NO: 13504 - protein, 15 aa, HUMAN IMMUNODEFICIENCY VIRUS
SVPLDKDFRKYTAFT

SEQ ID NO: 13505 - protein, 15 aa, HUMAN IMMUNODEFICIENCY VIRUS
FRVYYRDSRDPLWKG

SEQ ID NO: 13506 - protein, 15 aa, HUMAN IMMUNODEFICIENCY VIRUS
LKKIIGQVREQAEHL

SEQ ID NO: 13507 - protein, 15 aa, HUMAN IMMUNODEFICIENCY VIRUS
HEKYHNNWRAMASDF

SEQ ID NO: 13508 - protein, 15 aa, HUMAN IMMUNODEFICIENCY VIRUS
TRQARRNRRRRWRAR

SEQ ID NO: 13509 - protein, 15 aa, HUMAN IMMUNODEFICIENCY VIRUS
TRQARKNRRRRWRAR

SEQ ID NO: 13510 - protein, 15 aa, HUMAN IMMUNODEFICIENCY VIRUS
DEELLKTVRLIKFLY

SEQ ID NO: 13511 - protein, 15 aa, HUMAN IMMUNODEFICIENCY VIRUS
HPRISSEVHIPLGDA

SEQ ID NO: 13512 - protein, 15 aa, HUMAN IMMUNODEFICIENCY VIRUS
HPKVSSEVHIPLGEA

SEQ ID NO: 13513 - protein, 15 aa, HUMAN IMMUNODEFICIENCY VIRUS
GHGVSIEWRLRRYST

SEQ ID NO: 13514 - protein, 15 aa, HUMAN IMMUNODEFICIENCY VIRUS
IGILPSNTRGRGRRN

SEQ ID NO: 13515 - protein, 15 aa, HUMAN IMMUNODEFICIENCY VIRUS
TLELLEELKNEAVRH

SEQ ID NO: 13516 - protein, 15 aa, HUMAN IMMUNODEFICIENCY VIRUS
TLELLEELKSEAVRH

SEQ ID NO: 13517 - protein, 15 aa, HUMAN IMMUNODEFICIENCY VIRUS
DLLAKVDYRIVIVAF

SEQ ID NO: 13518 - protein, 15 aa, HUMAN IMMUNODEFICIENCY VIRUS
NFLAKVDYRLGVGAL

SEQ ID NO: 13519 - protein, 15 aa, HUMAN IMMUNODEFICIENCY VIRUS
YRKILRQRKIDRLID

SEQ ID NO: 13520 - protein, 9 aa, HUMAN IMMUNODEFICIENCY VIRUS
VSTQLLLNG

SEQ ID NO: 13521 - protein, 9 aa, HUMAN IMMUNODEFICIENCY VIRUS
VVSTQLLLN

SEQ ID NO: 13522 - protein, 9 aa, HUMAN IMMUNODEFICIENCY VIRUS
LTVWGIKQL

SEQ ID NO: 13523 - protein, 9 aa, HUMAN IMMUNODEFICIENCY VIRUS
LLSGIVQQQ

SEQ ID NO: 13524 - protein, 9 aa, HUMAN IMMUNODEFICIENCY VIRUS
WATHACVPT

SEQ ID NO: 13525 - protein, 9 aa, HUMAN IMMUNODEFICIENCY VIRUS
LGAAGSTMG

SEQ ID NO: 13526 - protein, 9 aa, HUMAN IMMUNODEFICIENCY VIRUS
VRQGYSPLS

SEQ ID NO: 13527 - protein, 9 aa, HUMAN IMMUNODEFICIENCY VIRUS
LLLNGSLAE

SEQ ID NO: 13528 - protein, 9 aa, HUMAN IMMUNODEFICIENCY VIRUS
VKLTPLCVT

SEQ ID NO: 13529 - protein, 9 aa, HUMAN IMMUNODEFICIENCY VIRUS
LRAIEAQQH

SEQ ID NO: 13530 - protein, 9 aa, HUMAN IMMUNODEFICIENCY VIRUS
VSTVQCTHG

SEQ ID NO: 13531 - protein, 9 aa, HUMAN IMMUNODEFICIENCY VIRUS
LGIWGCSGK

SEQ ID NO: 13532 - protein, 9 aa, HUMAN IMMUNODEFICIENCY VIRUS
LWDQSLKPC

SEQ ID NO: 13533 - protein, 9 aa, HUMAN IMMUNODEFICIENCY VIRUS
LGFLGAAGS

SEQ ID NO: 13534 - protein, 9 aa, HUMAN IMMUNODEFICIENCY VIRUS
VWATHACVP

SEQ ID NO: 13535 - protein, 9 aa, HUMAN IMMUNODEFICIENCY VIRUS
WGIKQLQAR

SEQ ID NO: 13536 - protein, 9 aa, HUMAN IMMUNODEFICIENCY VIRUS
LWYIKIFIM

SEQ ID NO: 13537 - protein, 9 aa, HUMAN IMMUNODEFICIENCY VIRUS
FCASDAKAY

SEQ ID NO: 13538 - protein, 9 aa, HUMAN IMMUNODEFICIENCY VIRUS
IVGGLIGLR

SEQ ID NO: 13539 - protein, 9 aa, HUMAN IMMUNODEFICIENCY VIRUS
IFIMIVGGL

SEQ ID NO: 13540 - protein, 9 aa, HUMAN IMMUNODEFICIENCY VIRUS
VYYGVPVWK

SEQ ID NO: 13541 - protein, 9 aa, HUMAN IMMUNODEFICIENCY VIRUS
IKQLQARVL

SEQ ID NO: 13542 - protein, 9 aa, HUMAN IMMUNODEFICIENCY VIRUS
IKIFIMIVG

SEQ ID NO: 13543 - protein, 9 aa, HUMAN IMMUNODEFICIENCY VIRUS
MGAASITLT

SEQ ID NO: 13544 - protein, 9 aa, HUMAN IMMUNODEFICIENCY VIRUS
YIKIFIMIV

SEQ ID NO: 13545 - protein, 9 aa, HUMAN IMMUNODEFICIENCY VIRUS
ITGLLLTRD

SEQ ID NO: 13546 - protein, 9 aa, HUMAN IMMUNODEFICIENCY VIRUS
IPIHYCAPA

SEQ ID NO: 13547 - protein, 9 aa, HUMAN IMMUNODEFICIENCY VIRUS
MIVGGLIGL

SEQ ID NO: 13548 - protein, 9 aa, HUMAN IMMUNODEFICIENCY VIRUS
VQARQLLSG

SEQ ID NO: 13549 - protein, 9 aa, HUMAN IMMUNODEFICIENCY VIRUS
FEPIPIHYC

SEQ ID NO: 13550 - protein, 9 aa, HUMAN IMMUNODEFICIENCY VIRUS
LRSLCLFSY

SEQ ID NO: 13551 - protein, 9 aa, HUMAN IMMUNODEFICIENCY VIRUS
MWKNNMVEQ

SEQ ID NO: 13552 - protein, 9 aa, HUMAN IMMUNODEFICIENCY VIRUS
VHNVWATHA

SEQ ID NO: 13553 - protein, 9 aa, HUMAN IMMUNODEFICIENCY VIRUS
WKNNMVEQM

SEQ ID NO: 13554 - protein, 9 aa, HUMAN IMMUNODEFICIENCY VIRUS
YYGVPVWKE

SEQ ID NO: 13555 - protein, 9 aa, HUMAN IMMUNODEFICIENCY VIRUS
LLQLTVWGI

SEQ ID NO: 13556 - protein, 9 aa, HUMAN IMMUNODEFICIENCY VIRUS
IEPLGVAPT

SEQ ID NO: 13557 - protein, 9 aa, HUMAN IMMUNODEFICIENCY VIRUS
IKPVVSTQL

SEQ ID NO: 13558 - protein, 9 aa, HUMAN IMMUNODEFICIENCY VIRUS
LQARVLAVE

SEQ ID NO: 13559 - protein, 9 aa, HUMAN IMMUNODEFICIENCY VIRUS
WDDLRSLCL

SEQ ID NO: 13560 - protein, 9 aa, HUMAN IMMUNODEFICIENCY VIRUS
IINIHTPHR

SEQ ID NO: 13561 - protein, 9 aa, HUMAN IMMUNODEFICIENCY VIRUS
INIHTPHRE

SEQ ID NO: 13562 - protein, 9 aa, HUMAN IMMUNODEFICIENCY VIRUS
ITQACPKVS

SEQ ID NO: 13563 - protein, 9 aa, HUMAN IMMUNODEFICIENCY VIRUS
IVQQQSNLL

SEQ ID NO: 13564 - protein, 9 aa, HUMAN IMMUNODEFICIENCY VIRUS
LGNNSTNST

SEQ ID NO: 13565 - protein, 9 aa, HUMAN IMMUNODEFICIENCY VIRUS
VISTRTHRE

SEQ ID NO: 13566 - protein, 9 aa, HUMAN IMMUNODEFICIENCY VIRUS
WRWGTLFLG

SEQ ID NO: 13567 - protein, 9 aa, HUMAN IMMUNODEFICIENCY VIRUS
WRWGTMLLG

SEQ ID NO: 13568 - protein, 9 aa, HUMAN IMMUNODEFICIENCY VIRUS
FAVLSIVNR

SEQ ID NO: 13569 - protein, 9 aa, HUMAN IMMUNODEFICIENCY VIRUS
LLNGSLAEE

SEQ ID NO: 13570 - protein, 9 aa, HUMAN IMMUNODEFICIENCY VIRUS
LTPLCVTLN

SEQ ID NO: 13571 - protein, 9 aa, HUMAN IMMUNODEFICIENCY VIRUS
LYKYKVVKI

SEQ ID NO: 13572 - protein, 9 aa, HUMAN IMMUNODEFICIENCY VIRUS
VPWNSSWSN

SEQ ID NO: 13573 - protein, 9 aa, HUMAN IMMUNODEFICIENCY VIRUS
YRLINCNTS

SEQ ID NO: 13574 - protein, 9 aa, HUMAN IMMUNODEFICIENCY VIRUS
IHYCAPAGF

SEQ ID NO: 13575 - protein, 9 aa, HUMAN IMMUNODEFICIENCY VIRUS
LKDQQLLGI

SEQ ID NO: 13576 - protein, 9 aa, HUMAN IMMUNODEFICIENCY VIRUS
YKYKVVKIE

SEQ ID NO: 13577 - protein, 9 aa, HUMAN IMMUNODEFICIENCY VIRUS
IRPVVSTQL

SEQ ID NO: 13578 - protein, 9 aa, HUMAN IMMUNODEFICIENCY VIRUS
LDKWASLWN

SEQ ID NO: 13579 - protein, 9 aa, HUMAN IMMUNODEFICIENCY VIRUS
LRIVFAVLS

SEQ ID NO: 13580 - protein, 9 aa, HUMAN IMMUNODEFICIENCY VIRUS
LNGSLAEEE

SEQ ID NO: 13581 - protein, 9 aa, HUMAN IMMUNODEFICIENCY VIRUS
YKVVKIEPL

SEQ ID NO: 13582 - protein, 9 aa, HUMAN IMMUNODEFICIENCY VIRUS
LKGLRLGWE

SEQ ID NO: 13583 - protein, 9 aa, HUMAN IMMUNODEFICIENCY VIRUS
FSYHRLRDL

SEQ ID NO: 13584 - protein, 9 aa, HUMAN IMMUNODEFICIENCY VIRUS
INCTRPNNN

SEQ ID NO: 13585 - protein, 9 aa, HUMAN IMMUNODEFICIENCY VIRUS
VVKIEPLGV

SEQ ID NO: 13586 - protein, 9 aa, HUMAN IMMUNODEFICIENCY VIRUS
WKEATTTLF

SEQ ID NO: 13587 - protein, 9 aa, HUMAN IMMUNODEFICIENCY VIRUS
IGLRIVFAV

SEQ ID NO: 13588 - protein, 9 aa, HUMAN IMMUNODEFICIENCY VIRUS
FFYCNTSGL

SEQ ID NO: 13589 - protein, 9 aa, HUMAN IMMUNODEFICIENCY VIRUS
FGLGALFLG

SEQ ID NO: 13590 - protein, 9 aa, HUMAN IMMUNODEFICIENCY VIRUS
FYCNTSGLF

SEQ ID NO: 13591 - protein, 9 aa, HUMAN IMMUNODEFICIENCY VIRUS
LIGLRIVFA

SEQ ID NO: 13592 - protein, 9 aa, HUMAN IMMUNODEFICIENCY VIRUS
VGLGAVFLG

SEQ ID NO: 13593 - protein, 9 aa, HUMAN IMMUNODEFICIENCY VIRUS
VGLGMLFLG

SEQ ID NO: 13594 - protein, 9 aa, HUMAN IMMUNODEFICIENCY VIRUS
ICTTAVPWN

SEQ ID NO: 13595 - protein, 9 aa, HUMAN IMMUNODEFICIENCY VIRUS
ICTTNVPWN

SEQ ID NO: 13596 - protein, 9 aa, HUMAN IMMUNODEFICIENCY VIRUS
LGVAPTKAK

SEQ ID NO: 13597 - protein, 9 aa, HUMAN IMMUNODEFICIENCY VIRUS
LICTTAVPW

SEQ ID NO: 13598 - protein, 9 aa, HUMAN IMMUNODEFICIENCY VIRUS
LRDQQLLGI

SEQ ID NO: 13599 - protein, 9 aa, HUMAN IMMUNODEFICIENCY VIRUS
VFLGFLGAA

SEQ ID NO: 13600 - protein, 9 aa, HUMAN IMMUNODEFICIENCY VIRUS
FSYHRLRDF

SEQ ID NO: 13601 - protein, 9 aa, HUMAN IMMUNODEFICIENCY VIRUS
IPIHYCTPA

SEQ ID NO: 13602 - protein, 9 aa, HUMAN IMMUNODEFICIENCY VIRUS
IVFAVLSIV

SEQ ID NO: 13603 - protein, 9 aa, HUMAN IMMUNODEFICIENCY VIRUS
VFAVLSIVN

SEQ ID NO: 13604 - protein, 9 aa, HUMAN IMMUNODEFICIENCY VIRUS
VPWNASWSN

SEQ ID NO: 13605 - protein, 9 aa, HUMAN IMMUNODEFICIENCY VIRUS
IGLRIIFAV

SEQ ID NO: 13606 - protein, 9 aa, HUMAN IMMUNODEFICIENCY VIRUS
IRQAHCNIS

SEQ ID NO: 13607 - protein, 9 aa, HUMAN IMMUNODEFICIENCY VIRUS
VAPTKAKRR

SEQ ID NO: 13608 - protein, 9 aa, HUMAN IMMUNODEFICIENCY VIRUS
FNGTGPCKN

SEQ ID NO: 13609 - protein, 9 aa, HUMAN IMMUNODEFICIENCY VIRUS
IGPGQTFYA

SEQ ID NO: 13610 - protein, 9 aa, HUMAN IMMUNODEFICIENCY VIRUS
IGSGQAFYV

SEQ ID NO: 13611 - protein, 9 aa, HUMAN IMMUNODEFICIENCY VIRUS
IRYLNLVNQ

SEQ ID NO: 13612 - protein, 9 aa, HUMAN IMMUNODEFICIENCY VIRUS
LIGLRIIFA

SEQ ID NO: 13613 - protein, 9 aa, HUMAN IMMUNODEFICIENCY VIRUS
LLQYWSQEL

SEQ ID NO: 13614 - protein, 9 aa, HUMAN IMMUNODEFICIENCY VIRUS
LRNLCLFSY

SEQ ID NO: 13615 - protein, 9 aa, HUMAN IMMUNODEFICIENCY VIRUS
LVSGFLALA

SEQ ID NO: 13616 - protein, 9 aa, HUMAN IMMUNODEFICIENCY VIRUS
VSGFLALAW

SEQ ID NO: 13617 - protein, 9 aa, HUMAN IMMUNODEFICIENCY VIRUS
FDPIPIHYC

SEQ ID NO: 13618 - protein, 9 aa, HUMAN IMMUNODEFICIENCY VIRUS
IIFAVLSIV

SEQ ID NO: 13619 - protein, 9 aa, HUMAN IMMUNODEFICIENCY VIRUS
LINCNTSAI

SEQ ID NO: 13620 - protein, 9 aa, HUMAN IMMUNODEFICIENCY VIRUS
LLNATAIAV

SEQ ID NO: 13621 - protein, 9 aa, HUMAN IMMUNODEFICIENCY VIRUS
LRIIFAVLS

SEQ ID NO: 13622 - protein, 9 aa, HUMAN IMMUNODEFICIENCY VIRUS
VITQACPKV

SEQ ID NO: 13623 - protein, 9 aa, HUMAN IMMUNODEFICIENCY VIRUS
YWWNLLQYW

SEQ ID NO: 13624 - protein, 9 aa, HUMAN IMMUNODEFICIENCY VIRUS
FAILKCNDK

SEQ ID NO: 13625 - protein, 9 aa, HUMAN IMMUNODEFICIENCY VIRUS
IFAVLSIVN

SEQ ID NO: 13626 - protein, 9 aa, HUMAN IMMUNODEFICIENCY VIRUS
INCNTSAIT

SEQ ID NO: 13627 - protein, 9 aa, HUMAN IMMUNODEFICIENCY VIRUS
LNATAIAVA

SEQ ID NO: 13628 - protein, 9 aa, HUMAN IMMUNODEFICIENCY VIRUS
WNSSWSNKS

SEQ ID NO: 13629 - protein, 9 aa, HUMAN IMMUNODEFICIENCY VIRUS
WNASWSNKS

SEQ ID NO: 13630 - protein, 9 aa, HUMAN IMMUNODEFICIENCY VIRUS
ICTTTVPWN

SEQ ID NO: 13631 - protein, 9 aa, HUMAN IMMUNODEFICIENCY VIRUS
LLKLTVWGI

SEQ ID NO: 13632 - protein, 9 aa, HUMAN IMMUNODEFICIENCY VIRUS
LYKYKVVEI

SEQ ID NO: 13633 - protein, 9 aa, HUMAN IMMUNODEFICIENCY VIRUS
MFLGFLGAA

SEQ ID NO: 13634 - protein, 9 aa, HUMAN IMMUNODEFICIENCY VIRUS
MHSFNCGGE

SEQ ID NO: 13635 - protein, 9 aa, HUMAN IMMUNODEFICIENCY VIRUS
YWSQELKNS

SEQ ID NO: 13636 - protein, 9 aa, HUMAN IMMUNODEFICIENCY VIRUS
IGAVFLGFL

SEQ ID NO: 13637 - protein, 9 aa, HUMAN IMMUNODEFICIENCY VIRUS
LIAARTVEL

SEQ ID NO: 13638 - protein, 9 aa, HUMAN IMMUNODEFICIENCY VIRUS
LICTTTVPW

SEQ ID NO: 13639 - protein, 9 aa, HUMAN IMMUNODEFICIENCY VIRUS
LLNGSLAEG

SEQ ID NO: 13640 - protein, 9 aa, HUMAN IMMUNODEFICIENCY VIRUS
YWGQELKNS

SEQ ID NO: 13641 - protein, 9 aa, HUMAN IMMUNODEFICIENCY VIRUS
IAARTVELL

SEQ ID NO: 13642 - protein, 9 aa, HUMAN IMMUNODEFICIENCY VIRUS
LFLGFLGAA

SEQ ID NO: 13643 - protein, 9 aa, HUMAN IMMUNODEFICIENCY VIRUS
LKNSAVSLL

SEQ ID NO: 13644 - protein, 9 aa, HUMAN IMMUNODEFICIENCY VIRUS
VGIGAVFLG

SEQ ID NO: 13645 - protein, 9 aa, HUMAN IMMUNODEFICIENCY VIRUS
VSLLNATAI

SEQ ID NO: 13646 - protein, 9 aa, HUMAN IMMUNODEFICIENCY VIRUS
YATGDIIGD

SEQ ID NO: 13647 - protein, 9 aa, HUMAN IMMUNODEFICIENCY VIRUS
IAIAVAEGT

SEQ ID NO: 13648 - protein, 9 aa, HUMAN IMMUNODEFICIENCY VIRUS
IHYCTPAGF

SEQ ID NO: 13649 - protein, 9 aa, HUMAN IMMUNODEFICIENCY VIRUS
ILGLVIICS

SEQ ID NO: 13650 - protein, 9 aa, HUMAN IMMUNODEFICIENCY VIRUS
IWNNMTWME

SEQ ID NO: 13651 - protein, 9 aa, HUMAN IMMUNODEFICIENCY VIRUS
LGLVIICSA

SEQ ID NO: 13652 - protein, 9 aa, HUMAN IMMUNODEFICIENCY VIRUS
LRDFILIAA

SEQ ID NO: 13653 - protein, 9 aa, HUMAN IMMUNODEFICIENCY VIRUS
LTPLCVTLD

SEQ ID NO: 13654 - protein, 9 aa, HUMAN IMMUNODEFICIENCY VIRUS
MLQLTVWGI

SEQ ID NO: 13655 - protein, 9 aa, HUMAN IMMUNODEFICIENCY VIRUS
VEINCTRPN

SEQ ID NO: 13656 - protein, 9 aa, HUMAN IMMUNODEFICIENCY VIRUS
VRQLLSGIV

SEQ ID NO: 13657 - protein, 9 aa, HUMAN IMMUNODEFICIENCY VIRUS
LILGLVIIC

SEQ ID NO: 13658 - protein, 9 aa, HUMAN IMMUNODEFICIENCY VIRUS
VGGHQAAMQ

SEQ ID NO: 13659 - protein, 9 aa, HUMAN IMMUNODEFICIENCY VIRUS
LLVQNANPD

SEQ ID NO: 13660 - protein, 9 aa, HUMAN IMMUNODEFICIENCY VIRUS
VQNANPDCK

SEQ ID NO: 13661 - protein, 9 aa, HUMAN IMMUNODEFICIENCY VIRUS
LGLNKIVRM

SEQ ID NO: 13662 - protein, 9 aa, HUMAN IMMUNODEFICIENCY VIRUS
LSEGATPQD

SEQ ID NO: 13663 - protein, 9 aa, HUMAN IMMUNODEFICIENCY VIRUS
WIILGLNKI

SEQ ID NO: 13664 - protein, 9 aa, HUMAN IMMUNODEFICIENCY VIRUS
LEEMMTACQ

SEQ ID NO: 13665 - protein, 9 aa, HUMAN IMMUNODEFICIENCY VIRUS
YKRWIILGL

SEQ ID NO: 13666 - protein, 9 aa, HUMAN IMMUNODEFICIENCY VIRUS
IYKRWIILG

SEQ ID NO: 13667 - protein, 9 aa, HUMAN IMMUNODEFICIENCY VIRUS
VSQNYPIVQ

SEQ ID NO: 13668 - protein, 9 aa, HUMAN IMMUNODEFICIENCY VIRUS
WEKIRLRPG

SEQ ID NO: 13669 - protein, 9 aa, HUMAN IMMUNODEFICIENCY VIRUS
IAGTTSTLQ

SEQ ID NO: 13670 - protein, 9 aa, HUMAN IMMUNODEFICIENCY VIRUS
WASRELERF

SEQ ID NO: 13671 - protein, 9 aa, HUMAN IMMUNODEFICIENCY VIRUS
IPMFSALSE

SEQ ID NO: 13672 - protein, 9 aa, HUMAN IMMUNODEFICIENCY VIRUS
MFSALSEGA

SEQ ID NO: 13673 - protein, 9 aa, HUMAN IMMUNODEFICIENCY VIRUS
VIPMFSALS

SEQ ID NO: 13674 - protein, 9 aa, HUMAN IMMUNODEFICIENCY VIRUS
MYSPVSILD

SEQ ID NO: 13675 - protein, 9 aa, HUMAN IMMUNODEFICIENCY VIRUS
IVRMYSPVS

SEQ ID NO: 13676 - protein, 9 aa, HUMAN IMMUNODEFICIENCY VIRUS
VRMYSPVSI

SEQ ID NO: 13677 - protein, 9 aa, HUMAN IMMUNODEFICIENCY VIRUS
YSPVSILDI

SEQ ID NO: 13678 - protein, 9 aa, HUMAN IMMUNODEFICIENCY VIRUS
MTETLLVQN

SEQ ID NO: 13679 - protein, 9 aa, HUMAN IMMUNODEFICIENCY VIRUS
WMTETLLVQ

SEQ ID NO: 13680 - protein, 9 aa, HUMAN IMMUNODEFICIENCY VIRUS
ISPRTLNAW

SEQ ID NO: 13681 - protein, 9 aa, HUMAN IMMUNODEFICIENCY VIRUS
VKNWMTETL

SEQ ID NO: 13682 - protein, 9 aa, HUMAN IMMUNODEFICIENCY VIRUS
IKCFNCGKE

SEQ ID NO: 13683 - protein, 9 aa, HUMAN IMMUNODEFICIENCY VIRUS
IPVGEIYKR

SEQ ID NO: 13684 - protein, 9 aa, HUMAN IMMUNODEFICIENCY VIRUS
YTAVFMQRG

SEQ ID NO: 13685 - protein, 9 aa, HUMAN IMMUNODEFICIENCY VIRUS
VATLYCVHQ

SEQ ID NO: 13686 - protein, 9 aa, HUMAN IMMUNODEFICIENCY VIRUS
WDRLHPVHA

SEQ ID NO: 13687 - protein, 9 aa, HUMAN IMMUNODEFICIENCY VIRUS
FLQSRPEPT

SEQ ID NO: 13688 - protein, 9 aa, HUMAN IMMUNODEFICIENCY VIRUS
FKTLRAEQA

SEQ ID NO: 13689 - protein, 9 aa, HUMAN IMMUNODEFICIENCY VIRUS
MVHQAISPR

SEQ ID NO: 13690 - protein, 9 aa, HUMAN IMMUNODEFICIENCY VIRUS
VHQAISPRT

SEQ ID NO: 13691 - protein, 9 aa, HUMAN IMMUNODEFICIENCY VIRUS
YKTLRAEQA

SEQ ID NO: 13692 - protein, 9 aa, HUMAN IMMUNODEFICIENCY VIRUS
VSILDIRQG

SEQ ID NO: 13693 - protein, 9 aa, HUMAN IMMUNODEFICIENCY VIRUS
LAEAMSQVT

SEQ ID NO: 13694 - protein, 9 aa, HUMAN IMMUNODEFICIENCY VIRUS
LGKIWPSHK

SEQ ID NO: 13695 - protein, 9 aa, HUMAN IMMUNODEFICIENCY VIRUS
VKCFNCGKE

SEQ ID NO: 13696 - protein, 9 aa, HUMAN IMMUNODEFICIENCY VIRUS
YNTVATLYC

SEQ ID NO: 13697 - protein, 9 aa, HUMAN IMMUNODEFICIENCY VIRUS
LHPVHAGPI

SEQ ID NO: 13698 - protein, 9 aa, HUMAN IMMUNODEFICIENCY VIRUS
LYNTVATLY

SEQ ID NO: 13699 - protein, 9 aa, HUMAN IMMUNODEFICIENCY VIRUS
MTDTLLVQN

SEQ ID NO: 13700 - protein, 9 aa, HUMAN IMMUNODEFICIENCY VIRUS
WMTDTLLVQ

SEQ ID NO: 13701 - protein, 9 aa, HUMAN IMMUNODEFICIENCY VIRUS
IEVKDTKEA

SEQ ID NO: 13702 - protein, 9 aa, HUMAN IMMUNODEFICIENCY VIRUS
LQGQMVHQA

SEQ ID NO: 13703 - protein, 9 aa, HUMAN IMMUNODEFICIENCY VIRUS
MTNNPPIPV

SEQ ID NO: 13704 - protein, 9 aa, HUMAN IMMUNODEFICIENCY VIRUS
WMTNNPPIP

SEQ ID NO: 13705 - protein, 9 aa, HUMAN IMMUNODEFICIENCY VIRUS
IAPGQMREP

SEQ ID NO: 13706 - protein, 9 aa, HUMAN IMMUNODEFICIENCY VIRUS
VHAGPIAPG

SEQ ID NO: 13707 - protein, 9 aa, HUMAN IMMUNODEFICIENCY VIRUS
LGPGATLEE

SEQ ID NO: 13708 - protein, 9 aa, HUMAN IMMUNODEFICIENCY VIRUS
VHAGPIPPG

SEQ ID NO: 13709 - protein, 9 aa, HUMAN IMMUNODEFICIENCY VIRUS
IPPGQMREP

SEQ ID NO: 13710 - protein, 9 aa, HUMAN IMMUNODEFICIENCY VIRUS
LSPRTLNAW

SEQ ID NO: 13711 - protein, 9 aa, HUMAN IMMUNODEFICIENCY VIRUS
YRLKHLVWA

SEQ ID NO: 13712 - protein, 9 aa, HUMAN IMMUNODEFICIENCY VIRUS
LGPAATLEE

SEQ ID NO: 13713 - protein, 9 aa, HUMAN IMMUNODEFICIENCY VIRUS
LKALGPAAT

SEQ ID NO: 13714 - protein, 9 aa, HUMAN IMMUNODEFICIENCY VIRUS
LKDKEPPLA

SEQ ID NO: 13715 - protein, 9 aa, HUMAN IMMUNODEFICIENCY VIRUS
LSGGKLDAW

SEQ ID NO: 13716 - protein, 9 aa, HUMAN IMMUNODEFICIENCY VIRUS
MTSNPPIPV

SEQ ID NO: 13717 - protein, 9 aa, HUMAN IMMUNODEFICIENCY VIRUS
VKNWMTDTL

SEQ ID NO: 13718 - protein, 9 aa, HUMAN IMMUNODEFICIENCY VIRUS
VSILDIKQG

SEQ ID NO: 13719 - protein, 9 aa, HUMAN IMMUNODEFICIENCY VIRUS
WMTSNPPIP

SEQ ID NO: 13720 - protein, 9 aa, HUMAN IMMUNODEFICIENCY VIRUS
FNTVATLYC

SEQ ID NO: 13721 - protein, 9 aa, HUMAN IMMUNODEFICIENCY VIRUS
IPMFTALSE

SEQ ID NO: 13722 - protein, 9 aa, HUMAN IMMUNODEFICIENCY VIRUS
LASLKSLFG

SEQ ID NO: 13723 - protein, 9 aa, HUMAN IMMUNODEFICIENCY VIRUS
LERFAVNPG

SEQ ID NO: 13724 - protein, 9 aa, HUMAN IMMUNODEFICIENCY VIRUS
LFNTVATLY

SEQ ID NO: 13725 - protein, 9 aa, HUMAN IMMUNODEFICIENCY VIRUS
MFTALSEGA

SEQ ID NO: 13726 - protein, 9 aa, HUMAN IMMUNODEFICIENCY VIRUS
WDRVHPVHA

SEQ ID NO: 13727 - protein, 9 aa, HUMAN IMMUNODEFICIENCY VIRUS
IVRMYSPTS

SEQ ID NO: 13728 - protein, 9 aa, HUMAN IMMUNODEFICIENCY VIRUS
LERFALNPG

SEQ ID NO: 13729 - protein, 9 aa, HUMAN IMMUNODEFICIENCY VIRUS
LQEQIAWMT

SEQ ID NO: 13730 - protein, 9 aa, HUMAN IMMUNODEFICIENCY VIRUS
VHPVHAGPI

SEQ ID NO: 13731 - protein, 9 aa, HUMAN IMMUNODEFICIENCY VIRUS
VIPMFTALS

SEQ ID NO: 13732 - protein, 9 aa, HUMAN IMMUNODEFICIENCY VIRUS
VRMYSPTSI

SEQ ID NO: 13733 - protein, 9 aa, HUMAN IMMUNODEFICIENCY VIRUS
LGKIWPSNK

SEQ ID NO: 13734 - protein, 9 aa, HUMAN IMMUNODEFICIENCY VIRUS
LTSLKSLFG

SEQ ID NO: 13735 - protein, 9 aa, HUMAN IMMUNODEFICIENCY VIRUS
MYSPTSILD

SEQ ID NO: 13736 - protein, 9 aa, HUMAN IMMUNODEFICIENCY VIRUS
YKLKHIVWA

SEQ ID NO: 13737 - protein, 9 aa, HUMAN IMMUNODEFICIENCY VIRUS
YSPTSILDI

SEQ ID NO: 13738 - protein, 9 aa, HUMAN IMMUNODEFICIENCY VIRUS
LTSLRSLFG

SEQ ID NO: 13739 - protein, 9 aa, HUMAN IMMUNODEFICIENCY VIRUS
MMLNIVGGH

SEQ ID NO: 13740 - protein, 9 aa, HUMAN IMMUNODEFICIENCY VIRUS
IDVKDTKEA

SEQ ID NO: 13741 - protein, 9 aa, HUMAN IMMUNODEFICIENCY VIRUS
IGWMTSNPP

SEQ ID NO: 13742 - protein, 9 aa, HUMAN IMMUNODEFICIENCY VIRUS
IPVGDIYKR

SEQ ID NO: 13743 - protein, 9 aa, HUMAN IMMUNODEFICIENCY VIRUS
LYPLASLKS

SEQ ID NO: 13744 - protein, 9 aa, HUMAN IMMUNODEFICIENCY VIRUS
VHQALSPRT

SEQ ID NO: 13745 - protein, 9 aa, HUMAN IMMUNODEFICIENCY VIRUS
VNPGLLETS

SEQ ID NO: 13746 - protein, 9 aa, HUMAN IMMUNODEFICIENCY VIRUS
YPLASLKSL

SEQ ID NO: 13747 - protein, 9 aa, HUMAN IMMUNODEFICIENCY VIRUS
FLQNRPEPT

SEQ ID NO: 13748 - protein, 9 aa, HUMAN IMMUNODEFICIENCY VIRUS
IMMQKSNFK

SEQ ID NO: 13749 - protein, 9 aa, HUMAN IMMUNODEFICIENCY VIRUS
LAEAMSQVQ

SEQ ID NO: 13750 - protein, 9 aa, HUMAN IMMUNODEFICIENCY VIRUS
LGKIWPSSK

SEQ ID NO: 13751 - protein, 9 aa, HUMAN IMMUNODEFICIENCY VIRUS
LNPGLLETA

SEQ ID NO: 13752 - protein, 9 aa, HUMAN IMMUNODEFICIENCY VIRUS
YPLASLRSL

SEQ ID NO: 13753 - protein, 9 aa, HUMAN IMMUNODEFICIENCY VIRUS
WQNYTPGPG

SEQ ID NO: 13754 - protein, 9 aa, HUMAN IMMUNODEFICIENCY VIRUS
VRPQVPLRP

SEQ ID NO: 13755 - protein, 9 aa, HUMAN IMMUNODEFICIENCY VIRUS
VPLRPMTYK

SEQ ID NO: 13756 - protein, 9 aa, HUMAN IMMUNODEFICIENCY VIRUS
LTFGWCFKL

SEQ ID NO: 13757 - protein, 9 aa, HUMAN IMMUNODEFICIENCY VIRUS
ILDLWVYHT

SEQ ID NO: 13758 - protein, 9 aa, HUMAN IMMUNODEFICIENCY VIRUS
WCFKLVPVD

SEQ ID NO: 13759 - protein, 9 aa, HUMAN IMMUNODEFICIENCY VIRUS
LWVYHTQGY

SEQ ID NO: 13760 - protein, 9 aa, HUMAN IMMUNODEFICIENCY VIRUS
WSKSSIVGW

SEQ ID NO: 13761 - protein, 9 aa, HUMAN IMMUNODEFICIENCY VIRUS
ILDLWVYNT

SEQ ID NO: 13762 - protein, 9 aa, HUMAN IMMUNODEFICIENCY VIRUS
LLHPMSQHG

SEQ ID NO: 13763 - protein, 9 aa, HUMAN IMMUNODEFICIENCY VIRUS
LLHPICQHG

SEQ ID NO: 13764 - protein, 9 aa, HUMAN IMMUNODEFICIENCY VIRUS
IRYPLTFGW

SEQ ID NO: 13765 - protein, 9 aa, HUMAN IMMUNODEFICIENCY VIRUS
ITSSNTAAT

SEQ ID NO: 13766 - protein, 9 aa, HUMAN IMMUNODEFICIENCY VIRUS
LEKHGAITS

SEQ ID NO: 13767 - protein, 9 aa, HUMAN IMMUNODEFICIENCY VIRUS
LWVYHTQGF

SEQ ID NO: 13768 - protein, 9 aa, HUMAN IMMUNODEFICIENCY VIRUS
MTYKGAFDL

SEQ ID NO: 13769 - protein, 9 aa, HUMAN IMMUNODEFICIENCY VIRUS
LVPVDPREV

SEQ ID NO: 13770 - protein, 9 aa, HUMAN IMMUNODEFICIENCY VIRUS
VGWPAIRER

SEQ ID NO: 13771 - protein, 9 aa, HUMAN IMMUNODEFICIENCY VIRUS
WCFKLVPVE

SEQ ID NO: 13772 - protein, 9 aa, HUMAN IMMUNODEFICIENCY VIRUS
FDSRLAFHH

SEQ ID NO: 13773 - protein, 9 aa, HUMAN IMMUNODEFICIENCY VIRUS
FKLVPVDPR

SEQ ID NO: 13774 - protein, 9 aa, HUMAN IMMUNODEFICIENCY VIRUS
VPLRPMTFK

SEQ ID NO: 13775 - protein, 9 aa, HUMAN IMMUNODEFICIENCY VIRUS
LLDTGADDT

SEQ ID NO: 13776 - protein, 9 aa, HUMAN IMMUNODEFICIENCY VIRUS
WMGYELHPD

SEQ ID NO: 13777 - protein, 9 aa, HUMAN IMMUNODEFICIENCY VIRUS
YQYNVLPQG

SEQ ID NO: 13778 - protein, 9 aa, HUMAN IMMUNODEFICIENCY VIRUS
FRKYTAFTI

SEQ ID NO: 13779 - protein, 9 aa, HUMAN IMMUNODEFICIENCY VIRUS
WTVNDIQKL

SEQ ID NO: 13780 - protein, 9 aa, HUMAN IMMUNODEFICIENCY VIRUS
LDCTHLEGK

SEQ ID NO: 13781 - protein, 9 aa, HUMAN IMMUNODEFICIENCY VIRUS
LDVGDAYFS

SEQ ID NO: 13782 - protein, 9 aa, HUMAN IMMUNODEFICIENCY VIRUS
MDDLYVGSD

SEQ ID NO: 13783 - protein, 9 aa, HUMAN IMMUNODEFICIENCY VIRUS
VIPAETGQE

SEQ ID NO: 13784 - protein, 9 aa, HUMAN IMMUNODEFICIENCY VIRUS
WKGEGAVVI

SEQ ID NO: 13785 - protein, 9 aa, HUMAN IMMUNODEFICIENCY VIRUS
WQLDCTHLE

SEQ ID NO: 13786 - protein, 9 aa, HUMAN IMMUNODEFICIENCY VIRUS
VDFRELNKR

SEQ ID NO: 13787 - protein, 9 aa, HUMAN IMMUNODEFICIENCY VIRUS
WKPKMIGGI

SEQ ID NO: 13788 - protein, 9 aa, HUMAN IMMUNODEFICIENCY VIRUS
IWQLDCTHL

SEQ ID NO: 13789 - protein, 9 aa, HUMAN IMMUNODEFICIENCY VIRUS
VAVHVASGY

SEQ ID NO: 13790 - protein, 9 aa, HUMAN IMMUNODEFICIENCY VIRUS
WKGSPAIFQ

SEQ ID NO: 13791 - protein, 9 aa, HUMAN IMMUNODEFICIENCY VIRUS
IGGYSAGER

SEQ ID NO: 13792 - protein, 9 aa, HUMAN IMMUNODEFICIENCY VIRUS
YALGIIQAQ

SEQ ID NO: 13793 - protein, 9 aa, HUMAN IMMUNODEFICIENCY VIRUS
FWEVQLGIP

SEQ ID NO: 13794 - protein, 9 aa, HUMAN IMMUNODEFICIENCY VIRUS
IKKKDSTKW

SEQ ID NO: 13795 - protein, 9 aa, HUMAN IMMUNODEFICIENCY VIRUS
LGIIQAQPD

SEQ ID NO: 13796 - protein, 9 aa, HUMAN IMMUNODEFICIENCY VIRUS
LGIPHPAGL

SEQ ID NO: 13797 - protein, 9 aa, HUMAN IMMUNODEFICIENCY VIRUS
VNTPPLVKL

SEQ ID NO: 13798 - protein, 9 aa, HUMAN IMMUNODEFICIENCY VIRUS
VTVLDVGDA

SEQ ID NO: 13799 - protein, 9 aa, HUMAN IMMUNODEFICIENCY VIRUS
FPISPIETV

SEQ ID NO: 13800 - protein, 9 aa, HUMAN IMMUNODEFICIENCY VIRUS
ISPIETVPV

SEQ ID NO: 13801 - protein, 9 aa, HUMAN IMMUNODEFICIENCY VIRUS
FVNTPPLVK

SEQ ID NO: 13802 - protein, 9 aa, HUMAN IMMUNODEFICIENCY VIRUS
LNFPISPIE

SEQ ID NO: 13803 - protein, 9 aa, HUMAN IMMUNODEFICIENCY VIRUS
WEFVNTPPL

SEQ ID NO: 13804 - protein, 9 aa, HUMAN IMMUNODEFICIENCY VIRUS
IQNFRVYYR

SEQ ID NO: 13805 - protein, 9 aa, HUMAN IMMUNODEFICIENCY VIRUS
LVGPTPVNI

SEQ ID NO: 13806 - protein, 9 aa, HUMAN IMMUNODEFICIENCY VIRUS
VQLGIPHPA

SEQ ID NO: 13807 - protein, 9 aa, HUMAN IMMUNODEFICIENCY VIRUS
WQATWIPEW

SEQ ID NO: 13808 - protein, 9 aa, HUMAN IMMUNODEFICIENCY VIRUS
IETVPVKLK

SEQ ID NO: 13809 - protein, 9 aa, HUMAN IMMUNODEFICIENCY VIRUS
IGTVLVGPT

SEQ ID NO: 13810 - protein, 9 aa, HUMAN IMMUNODEFICIENCY VIRUS
LVAVHVASG

SEQ ID NO: 13811 - protein, 9 aa, HUMAN IMMUNODEFICIENCY VIRUS
VLVGPTPVN

SEQ ID NO: 13812 - protein, 9 aa, HUMAN IMMUNODEFICIENCY VIRUS
YIEAEVIPA

SEQ ID NO: 13813 - protein, 9 aa, HUMAN IMMUNODEFICIENCY VIRUS
YVGSDLEIG

SEQ ID NO: 13814 - protein, 9 aa, HUMAN IMMUNODEFICIENCY VIRUS
MDGPKVKQW

SEQ ID NO: 13815 - protein, 9 aa, HUMAN IMMUNODEFICIENCY VIRUS
VASGYIEAE

SEQ ID NO: 13816 - protein, 9 aa, HUMAN IMMUNODEFICIENCY VIRUS
VGPTPVNII

SEQ ID NO: 13817 - protein, 9 aa, HUMAN IMMUNODEFICIENCY VIRUS
VKQWPLTEE

SEQ ID NO: 13818 - protein, 9 aa, HUMAN IMMUNODEFICIENCY VIRUS
VYYRDSRDP

SEQ ID NO: 13819 - protein, 9 aa, HUMAN IMMUNODEFICIENCY VIRUS
WGFTTPDKK

SEQ ID NO: 13820 - protein, 9 aa, HUMAN IMMUNODEFICIENCY VIRUS
VIYQYMDDL

SEQ ID NO: 13821 - protein, 9 aa, HUMAN IMMUNODEFICIENCY VIRUS
LKKKKSVTV

SEQ ID NO: 13822 - protein, 9 aa, HUMAN IMMUNODEFICIENCY VIRUS
VPRRKAKII

SEQ ID NO: 13823 - protein, 9 aa, HUMAN IMMUNODEFICIENCY VIRUS
FPQITLWQR

SEQ ID NO: 13824 - protein, 9 aa, HUMAN IMMUNODEFICIENCY VIRUS
VIWGKTPKF

SEQ ID NO: 13825 - protein, 9 aa, HUMAN IMMUNODEFICIENCY VIRUS
YVDGAANRE

SEQ ID NO: 13826 - protein, 9 aa, HUMAN IMMUNODEFICIENCY VIRUS
FKNLKTGKY

SEQ ID NO: 13827 - protein, 9 aa, HUMAN IMMUNODEFICIENCY VIRUS
IQTKELQKQ

SEQ ID NO: 13828 - protein, 9 aa, HUMAN IMMUNODEFICIENCY VIRUS
YGKQMAGDD

SEQ ID NO: 13829 - protein, 9 aa, HUMAN IMMUNODEFICIENCY VIRUS
WRAMASDFN

SEQ ID NO: 13830 - protein, 9 aa, HUMAN IMMUNODEFICIENCY VIRUS
ISKIGPENP

SEQ ID NO: 13831 - protein, 9 aa, HUMAN IMMUNODEFICIENCY VIRUS
LTQIGCTLN

SEQ ID NO: 13832 - protein, 9 aa, HUMAN IMMUNODEFICIENCY VIRUS
IIQAQPDKS

SEQ ID NO: 13833 - protein, 9 aa, HUMAN IMMUNODEFICIENCY VIRUS
LPEKDSWTV

SEQ ID NO: 13834 - protein, 9 aa, HUMAN IMMUNODEFICIENCY VIRUS
FQSSMTKIL

SEQ ID NO: 13835 - protein, 9 aa, HUMAN IMMUNODEFICIENCY VIRUS
FTIPSINNE

SEQ ID NO: 13836 - protein, 9 aa, HUMAN IMMUNODEFICIENCY VIRUS
IFQSSMTKI

SEQ ID NO: 13837 - protein, 9 aa, HUMAN IMMUNODEFICIENCY VIRUS
IIEQLIKKE

SEQ ID NO: 13838 - protein, 9 aa, HUMAN IMMUNODEFICIENCY VIRUS
LSWVPAHKG

SEQ ID NO: 13839 - protein, 9 aa, HUMAN IMMUNODEFICIENCY VIRUS
YLSWVPAHK

SEQ ID NO: 13840 - protein, 9 aa, HUMAN IMMUNODEFICIENCY VIRUS
YTAFTIPSI

SEQ ID NO: 13841 - protein, 9 aa, HUMAN IMMUNODEFICIENCY VIRUS
IIATDIQTK

SEQ ID NO: 13842 - protein, 9 aa, HUMAN IMMUNODEFICIENCY VIRUS
IWKGPAKLL

SEQ ID NO: 13843 - protein, 9 aa, HUMAN IMMUNODEFICIENCY VIRUS
LQKQITKIQ

SEQ ID NO: 13844 - protein, 9 aa, HUMAN IMMUNODEFICIENCY VIRUS
LKEALLDTG

SEQ ID NO: 13845 - protein, 9 aa, HUMAN IMMUNODEFICIENCY VIRUS
VYLSWVPAH

SEQ ID NO: 13846 - protein, 9 aa, HUMAN IMMUNODEFICIENCY VIRUS
FILKLAGRW

SEQ ID NO: 13847 - protein, 9 aa, HUMAN IMMUNODEFICIENCY VIRUS
LEGKIILVA

SEQ ID NO: 13848 - protein, 9 aa, HUMAN IMMUNODEFICIENCY VIRUS
YFILKLAGR

SEQ ID NO: 13849 - protein, 9 aa, HUMAN IMMUNODEFICIENCY VIRUS
IILVAVHVA

SEQ ID NO: 13850 - protein, 9 aa, HUMAN IMMUNODEFICIENCY VIRUS
IWGKTPKFR

SEQ ID NO: 13851 - protein, 9 aa, HUMAN IMMUNODEFICIENCY VIRUS
LAGRWPVKV

SEQ ID NO: 13852 - protein, 9 aa, HUMAN IMMUNODEFICIENCY VIRUS
VVAKEIVAS

SEQ ID NO: 13853 - protein, 9 aa, HUMAN IMMUNODEFICIENCY VIRUS
IDIIATDIQ

SEQ ID NO: 13854 - protein, 9 aa, HUMAN IMMUNODEFICIENCY VIRUS
IIDIIATDI

SEQ ID NO: 13855 - protein, 9 aa, HUMAN IMMUNODEFICIENCY VIRUS
IIGRNMLTQ

SEQ ID NO: 13856 - protein, 9 aa, HUMAN IMMUNODEFICIENCY VIRUS
IKVKQLCKL

SEQ ID NO: 13857 - protein, 9 aa, HUMAN IMMUNODEFICIENCY VIRUS
VDKLVSSGI

SEQ ID NO: 13858 - protein, 9 aa, HUMAN IMMUNODEFICIENCY VIRUS
IVGAETFYV

SEQ ID NO: 13859 - protein, 9 aa, HUMAN IMMUNODEFICIENCY VIRUS
LPPVVAKEI

SEQ ID NO: 13860 - protein, 9 aa, HUMAN IMMUNODEFICIENCY VIRUS
WTVQPIQLP

SEQ ID NO: 13861 - protein, 9 aa, HUMAN IMMUNODEFICIENCY VIRUS
FNLPPVVAK

SEQ ID NO: 13862 - protein, 9 aa, HUMAN IMMUNODEFICIENCY VIRUS
FTSAAVKAA

SEQ ID NO: 13863 - protein, 9 aa, HUMAN IMMUNODEFICIENCY VIRUS
LALQDSGLE

SEQ ID NO: 13864 - protein, 9 aa, HUMAN IMMUNODEFICIENCY VIRUS
LPPIVAKEI

SEQ ID NO: 13865 - protein, 9 aa, HUMAN IMMUNODEFICIENCY VIRUS
LQDSGLEVN

SEQ ID NO: 13866 - protein, 9 aa, HUMAN IMMUNODEFICIENCY VIRUS
FNLPPIVAK

SEQ ID NO: 13867 - protein, 9 aa, HUMAN IMMUNODEFICIENCY VIRUS
IGQHRAKIE

SEQ ID NO: 13868 - protein, 9 aa, HUMAN IMMUNODEFICIENCY VIRUS
IIGRNLLTQ

SEQ ID NO: 13869 - protein, 9 aa, HUMAN IMMUNODEFICIENCY VIRUS
LEVNIVTDS

SEQ ID NO: 13870 - protein, 9 aa, HUMAN IMMUNODEFICIENCY VIRUS
LRGAKALTD

SEQ ID NO: 13871 - protein, 9 aa, HUMAN IMMUNODEFICIENCY VIRUS
LVSSGIRKV

SEQ ID NO: 13872 - protein, 9 aa, HUMAN IMMUNODEFICIENCY VIRUS
FLLKLAGRW

SEQ ID NO: 13873 - protein, 9 aa, HUMAN IMMUNODEFICIENCY VIRUS
LALQDSGSE

SEQ ID NO: 13874 - protein, 9 aa, HUMAN IMMUNODEFICIENCY VIRUS
LQDSGSEVN

SEQ ID NO: 13875 - protein, 9 aa, HUMAN IMMUNODEFICIENCY VIRUS
VKVIHTDNG

SEQ ID NO: 13876 - protein, 9 aa, HUMAN IMMUNODEFICIENCY VIRUS
WPVKVIHTD

SEQ ID NO: 13877 - protein, 9 aa, HUMAN IMMUNODEFICIENCY VIRUS
YFLLKLAGR

SEQ ID NO: 13878 - protein, 9 aa, HUMAN IMMUNODEFICIENCY VIRUS
ICGKKAIGT

SEQ ID NO: 13879 - protein, 9 aa, HUMAN IMMUNODEFICIENCY VIRUS
IVAKEIVAS

SEQ ID NO: 13880 - protein, 9 aa, HUMAN IMMUNODEFICIENCY VIRUS
LRWGFTTPD

SEQ ID NO: 13881 - protein, 9 aa, HUMAN IMMUNODEFICIENCY VIRUS
LEGKVILVA

SEQ ID NO: 13882 - protein, 9 aa, HUMAN IMMUNODEFICIENCY VIRUS
LKWGFTTPD

SEQ ID NO: 13883 - protein, 9 aa, HUMAN IMMUNODEFICIENCY VIRUS
VILVAVHVA

SEQ ID NO: 13884 - protein, 9 aa, HUMAN IMMUNODEFICIENCY VIRUS
LAWVPAHKG

SEQ ID NO: 13885 - protein, 9 aa, HUMAN IMMUNODEFICIENCY VIRUS
YDQILIEIC

SEQ ID NO: 13886 - protein, 9 aa, HUMAN IMMUNODEFICIENCY VIRUS
YLAWVPAHK

SEQ ID NO: 13887 - protein, 9 aa, HUMAN IMMUNODEFICIENCY VIRUS
IGQHRTKIE

SEQ ID NO: 13888 - protein, 9 aa, HUMAN IMMUNODEFICIENCY VIRUS
IGRNLLTQI

SEQ ID NO: 13889 - protein, 9 aa, HUMAN IMMUNODEFICIENCY VIRUS
LWQRPLVTI

SEQ ID NO: 13890 - protein, 9 aa, HUMAN IMMUNODEFICIENCY VIRUS
VSLTETTNQ

SEQ ID NO: 13891 - protein, 9 aa, HUMAN IMMUNODEFICIENCY VIRUS
VYLAWVPAH

SEQ ID NO: 13892 - protein, 9 aa, HUMAN IMMUNODEFICIENCY VIRUS
ICGHKAIGT

SEQ ID NO: 13893 - protein, 9 aa, HUMAN IMMUNODEFICIENCY VIRUS
LRGTKALTE

SEQ ID NO: 13894 - protein, 9 aa, HUMAN IMMUNODEFICIENCY VIRUS
LVNQIIEQL

SEQ ID NO: 13895 - protein, 9 aa, HUMAN IMMUNODEFICIENCY VIRUS
LVSQIIEQL

SEQ ID NO: 13896 - protein, 9 aa, HUMAN IMMUNODEFICIENCY VIRUS
YFSVPLDKD

SEQ ID NO: 13897 - protein, 9 aa, HUMAN IMMUNODEFICIENCY VIRUS
IGRNMLTQI

SEQ ID NO: 13898 - protein, 9 aa, HUMAN IMMUNODEFICIENCY VIRUS
IKVRQLCKL

SEQ ID NO: 13899 - protein, 9 aa, HUMAN IMMUNODEFICIENCY VIRUS
LWKGPAKLL

SEQ ID NO: 13900 - protein, 9 aa, HUMAN IMMUNODEFICIENCY VIRUS
LWQRPLVTV

SEQ ID NO: 13901 - protein, 9 aa, HUMAN IMMUNODEFICIENCY VIRUS
YAGIKVKQL

SEQ ID NO: 13902 - protein, 9 aa, HUMAN IMMUNODEFICIENCY VIRUS
IWGKTPKFK

SEQ ID NO: 13903 - protein, 9 aa, HUMAN IMMUNODEFICIENCY VIRUS
LREHLLKWG

SEQ ID NO: 13904 - protein, 9 aa, HUMAN IMMUNODEFICIENCY VIRUS
VQPIQLPEK

SEQ ID NO: 13905 - protein, 9 aa, HUMAN IMMUNODEFICIENCY VIRUS
WQRPLVTIK

SEQ ID NO: 13906 - protein, 9 aa, HUMAN IMMUNODEFICIENCY VIRUS
IIQAQPDRS

SEQ ID NO: 13907 - protein, 9 aa, HUMAN IMMUNODEFICIENCY VIRUS
LQAIHLALQ

SEQ ID NO: 13908 - protein, 9 aa, HUMAN IMMUNODEFICIENCY VIRUS
LVEICTEME

SEQ ID NO: 13909 - protein, 9 aa, HUMAN IMMUNODEFICIENCY VIRUS
LRQHLLRWG

SEQ ID NO: 13910 - protein, 9 aa, HUMAN IMMUNODEFICIENCY VIRUS
LTQLGCTLN

SEQ ID NO: 13911 - protein, 9 aa, HUMAN IMMUNODEFICIENCY VIRUS
LVSAGIRKV

SEQ ID NO: 13912 - protein, 9 aa, HUMAN IMMUNODEFICIENCY VIRUS
VDKLVSAGI

SEQ ID NO: 13913 - protein, 9 aa, HUMAN IMMUNODEFICIENCY VIRUS
YPGIKVRQL

SEQ ID NO: 13914 - protein, 9 aa, HUMAN IMMUNODEFICIENCY VIRUS
FRKQNPDIV

SEQ ID NO: 13915 - protein, 9 aa, HUMAN IMMUNODEFICIENCY VIRUS
FSFPQITLW

SEQ ID NO: 13916 - protein, 9 aa, HUMAN IMMUNODEFICIENCY VIRUS
FTSTTVKAA

SEQ ID NO: 13917 - protein, 9 aa, HUMAN IMMUNODEFICIENCY VIRUS
IIASDIQTK

SEQ ID NO: 13918 - protein, 9 aa, HUMAN IMMUNODEFICIENCY VIRUS
LAGRWPVKT

SEQ ID NO: 13919 - protein, 9 aa, HUMAN IMMUNODEFICIENCY VIRUS
VQKIATESI

SEQ ID NO: 13920 - protein, 9 aa, HUMAN IMMUNODEFICIENCY VIRUS
FTIPSTNNE

SEQ ID NO: 13921 - protein, 9 aa, HUMAN IMMUNODEFICIENCY VIRUS
LEDINLPGK

SEQ ID NO: 13922 - protein, 9 aa, HUMAN IMMUNODEFICIENCY VIRUS
LTDIVPLTE

SEQ ID NO: 13923 - protein, 9 aa, HUMAN IMMUNODEFICIENCY VIRUS
LVTIKIGGQ

SEQ ID NO: 13924 - protein, 9 aa, HUMAN IMMUNODEFICIENCY VIRUS
MRGAHTNDV

SEQ ID NO: 13925 - protein, 9 aa, HUMAN IMMUNODEFICIENCY VIRUS
VKTIHTDNG

SEQ ID NO: 13926 - protein, 9 aa, HUMAN IMMUNODEFICIENCY VIRUS
VQPIVLPEK

SEQ ID NO: 13927 - protein, 9 aa, HUMAN IMMUNODEFICIENCY VIRUS
WPVKTIHTD

SEQ ID NO: 13928 - protein, 9 aa, HUMAN IMMUNODEFICIENCY VIRUS
WQRPLVTVK

SEQ ID NO: 13929 - protein, 9 aa, HUMAN IMMUNODEFICIENCY VIRUS
WTVQPIVLP

SEQ ID NO: 13930 - protein, 9 aa, HUMAN IMMUNODEFICIENCY VIRUS
YTAFTIPST

SEQ ID NO: 13931 - protein, 9 aa, HUMAN IMMUNODEFICIENCY VIRUS
IDIIASDIQ

SEQ ID NO: 13932 - protein, 9 aa, HUMAN IMMUNODEFICIENCY VIRUS
IIDIIASDI

SEQ ID NO: 13933 - protein, 9 aa, HUMAN IMMUNODEFICIENCY VIRUS
IVDIIATDI

SEQ ID NO: 13934 - protein, 9 aa, HUMAN IMMUNODEFICIENCY VIRUS
LEEINLPGK

SEQ ID NO: 13935 - protein, 9 aa, HUMAN IMMUNODEFICIENCY VIRUS
LQAIYLALQ

SEQ ID NO: 13936 - protein, 9 aa, HUMAN IMMUNODEFICIENCY VIRUS
LQKQIIKIQ

SEQ ID NO: 13937 - protein, 9 aa, HUMAN IMMUNODEFICIENCY VIRUS
VDIIATDIQ

SEQ ID NO: 13938 - protein, 9 aa, HUMAN IMMUNODEFICIENCY VIRUS
YDQIPIEIC

SEQ ID NO: 13939 - protein, 9 aa, HUMAN IMMUNODEFICIENCY VIRUS
FNFPQITLW

SEQ ID NO: 13940 - protein, 9 aa, HUMAN IMMUNODEFICIENCY VIRUS
IGRNMLTQL

SEQ ID NO: 13941 - protein, 9 aa, HUMAN IMMUNODEFICIENCY VIRUS
ISRIGPENP

SEQ ID NO: 13942 - protein, 9 aa, HUMAN IMMUNODEFICIENCY VIRUS
LTEVIPLTE

SEQ ID NO: 13943 - protein, 9 aa, HUMAN IMMUNODEFICIENCY VIRUS
MESIVIWGK

SEQ ID NO: 13944 - protein, 9 aa, HUMAN IMMUNODEFICIENCY VIRUS
VPRRKVKII

SEQ ID NO: 13945 - protein, 9 aa, HUMAN IMMUNODEFICIENCY VIRUS
VSFSFPQIT

SEQ ID NO: 13946 - protein, 9 aa, HUMAN IMMUNODEFICIENCY VIRUS
WYQLETEPI

SEQ ID NO: 13947 - protein, 9 aa, HUMAN IMMUNODEFICIENCY VIRUS
YPGIKVKQL

SEQ ID NO: 13948 - protein, 9 aa, HUMAN IMMUNODEFICIENCY VIRUS
FPQGEAREF

SEQ ID NO: 13949 - protein, 9 aa, HUMAN IMMUNODEFICIENCY VIRUS
LIEALLDTG

SEQ ID NO: 13950 - protein, 9 aa, HUMAN IMMUNODEFICIENCY VIRUS
VSLTDTTNQ

SEQ ID NO: 13951 - protein, 9 aa, HUMAN IMMUNODEFICIENCY VIRUS
WETWWTDYW

SEQ ID NO: 13952 - protein, 9 aa, HUMAN IMMUNODEFICIENCY VIRUS
YAKMRTAHT

SEQ ID NO: 13953 - protein, 9 aa, HUMAN IMMUNODEFICIENCY VIRUS
YKNLKTGKY

SEQ ID NO: 13954 - protein, 9 aa, HUMAN IMMUNODEFICIENCY VIRUS
LQLPPLERL

SEQ ID NO: 13955 - protein, 9 aa, HUMAN IMMUNODEFICIENCY VIRUS
VPLQLPPLE

SEQ ID NO: 13956 - protein, 9 aa, HUMAN IMMUNODEFICIENCY VIRUS
LYQSNPPPS

SEQ ID NO: 13957 - protein, 9 aa, HUMAN IMMUNODEFICIENCY VIRUS
VRIIKILYQ

SEQ ID NO: 13958 - protein, 9 aa, HUMAN IMMUNODEFICIENCY VIRUS
YQSNPPPSP

SEQ ID NO: 13959 - protein, 9 aa, HUMAN IMMUNODEFICIENCY VIRUS
LQLPPIERL

SEQ ID NO: 13960 - protein, 9 aa, HUMAN IMMUNODEFICIENCY VIRUS
VPLQLPPIE

SEQ ID NO: 13961 - protein, 9 aa, HUMAN IMMUNODEFICIENCY VIRUS
WNHPGSQPK

SEQ ID NO: 13962 - protein, 9 aa, HUMAN IMMUNODEFICIENCY VIRUS
FLNKGLGIS

SEQ ID NO: 13963 - protein, 9 aa, HUMAN IMMUNODEFICIENCY VIRUS
WKHPGSQPK

SEQ ID NO: 13964 - protein, 9 aa, HUMAN IMMUNODEFICIENCY VIRUS
YCKKCCFHC

SEQ ID NO: 13965 - protein, 9 aa, HUMAN IMMUNODEFICIENCY VIRUS
YCKKCCYHC

SEQ ID NO: 13966 - protein, 9 aa, HUMAN IMMUNODEFICIENCY VIRUS
WNHPGSQPT

SEQ ID NO: 13967 - protein, 9 aa, HUMAN IMMUNODEFICIENCY VIRUS
MIVWQVDRM

SEQ ID NO: 13968 - protein, 9 aa, HUMAN IMMUNODEFICIENCY VIRUS
WQVMIVWQV

SEQ ID NO: 13969 - protein, 9 aa, HUMAN IMMUNODEFICIENCY VIRUS
WQVDRMRIR

SEQ ID NO: 13970 - protein, 9 aa, HUMAN IMMUNODEFICIENCY VIRUS
LQYLALTAL

SEQ ID NO: 13971 - protein, 9 aa, HUMAN IMMUNODEFICIENCY VIRUS
LGHGVSIEW

SEQ ID NO: 13972 - protein, 9 aa, HUMAN IMMUNODEFICIENCY VIRUS
VDRMRIRTW

SEQ ID NO: 13973 - protein, 9 aa, HUMAN IMMUNODEFICIENCY VIRUS
YFDCFSESA

SEQ ID NO: 13974 - protein, 9 aa, HUMAN IMMUNODEFICIENCY VIRUS
YWGLHTGER

SEQ ID NO: 13975 - protein, 9 aa, HUMAN IMMUNODEFICIENCY VIRUS
IRTWNSLVK

SEQ ID NO: 13976 - protein, 9 aa, HUMAN IMMUNODEFICIENCY VIRUS
LGQGVSIEW

SEQ ID NO: 13977 - protein, 9 aa, HUMAN IMMUNODEFICIENCY VIRUS
LVKHHMYVS

SEQ ID NO: 13978 - protein, 9 aa, HUMAN IMMUNODEFICIENCY VIRUS
IPLGEARLV

SEQ ID NO: 13979 - protein, 9 aa, HUMAN IMMUNODEFICIENCY VIRUS
LVKHHMYIS

SEQ ID NO: 13980 - protein, 9 aa, HUMAN IMMUNODEFICIENCY VIRUS
YLALTALIK

SEQ ID NO: 13981 - protein, 9 aa, HUMAN IMMUNODEFICIENCY VIRUS
IRTWKSLVK

SEQ ID NO: 13982 - protein, 9 aa, HUMAN IMMUNODEFICIENCY VIRUS
LADQLIHLY

SEQ ID NO: 13983 - protein, 9 aa, HUMAN IMMUNODEFICIENCY VIRUS
LALTALIKP

SEQ ID NO: 13984 - protein, 9 aa, HUMAN IMMUNODEFICIENCY VIRUS
VDPGLADQL

SEQ ID NO: 13985 - protein, 9 aa, HUMAN IMMUNODEFICIENCY VIRUS
LYYFDCFSE

SEQ ID NO: 13986 - protein, 9 aa, HUMAN IMMUNODEFICIENCY VIRUS
FSESAIRKA

SEQ ID NO: 13987 - protein, 9 aa, HUMAN IMMUNODEFICIENCY VIRUS
LADQLIHMH

SEQ ID NO: 13988 - protein, 9 aa, HUMAN IMMUNODEFICIENCY VIRUS
WQVDRMKIR

SEQ ID NO: 13989 - protein, 9 aa, HUMAN IMMUNODEFICIENCY VIRUS
FSDSAIRKA

SEQ ID NO: 13990 - protein, 9 aa, HUMAN IMMUNODEFICIENCY VIRUS
FSESAIRNA

SEQ ID NO: 13991 - protein, 9 aa, HUMAN IMMUNODEFICIENCY VIRUS
IVSPRCEYQ

SEQ ID NO: 13992 - protein, 9 aa, HUMAN IMMUNODEFICIENCY VIRUS
LQYLALAAL

SEQ ID NO: 13993 - protein, 9 aa, HUMAN IMMUNODEFICIENCY VIRUS
VDRMKIRTW

SEQ ID NO: 13994 - protein, 9 aa, HUMAN IMMUNODEFICIENCY VIRUS
YWGLQTGER

SEQ ID NO: 13995 - protein, 9 aa, HUMAN IMMUNODEFICIENCY VIRUS
IPLGDARLV

SEQ ID NO: 13996 - protein, 9 aa, HUMAN IMMUNODEFICIENCY VIRUS
LQYLALKAL

SEQ ID NO: 13997 - protein, 9 aa, HUMAN IMMUNODEFICIENCY VIRUS
WQVDRMRIN

SEQ ID NO: 13998 - protein, 9 aa, HUMAN IMMUNODEFICIENCY VIRUS
IKPKKIKPP

SEQ ID NO: 13999 - protein, 9 aa, HUMAN IMMUNODEFICIENCY VIRUS
VDRMRINTW

SEQ ID NO: 14000 - protein, 9 aa, HUMAN IMMUNODEFICIENCY VIRUS
IGCQHSRIG

SEQ ID NO: 14001 - protein, 9 aa, HUMAN IMMUNODEFICIENCY VIRUS
WTLELLEEL

SEQ ID NO: 14002 - protein, 9 aa, HUMAN IMMUNODEFICIENCY VIRUS
ILQQLLFIH

SEQ ID NO: 14003 - protein, 9 aa, HUMAN IMMUNODEFICIENCY VIRUS
FIHFRIGCQ

SEQ ID NO: 14004 - protein, 9 aa, HUMAN IMMUNODEFICIENCY VIRUS
YNEWTLELL

SEQ ID NO: 14005 - protein, 9 aa, HUMAN IMMUNODEFICIENCY VIRUS
FPRPWLHGL

SEQ ID NO: 14006 - protein, 9 aa, HUMAN IMMUNODEFICIENCY VIRUS
WEGVEAIIR

SEQ ID NO: 14007 - protein, 9 aa, HUMAN IMMUNODEFICIENCY VIRUS
LEELKSEAV

SEQ ID NO: 14008 - protein, 9 aa, HUMAN IMMUNODEFICIENCY VIRUS
WAGVEAIIR

SEQ ID NO: 14009 - protein, 9 aa, HUMAN IMMUNODEFICIENCY VIRUS
YGDTWAGVE

SEQ ID NO: 14010 - protein, 9 aa, HUMAN IMMUNODEFICIENCY VIRUS
IGCRHSRIG

SEQ ID NO: 14011 - protein, 9 aa, HUMAN IMMUNODEFICIENCY VIRUS
FIHFRIGCR

SEQ ID NO: 14012 - protein, 9 aa, HUMAN IMMUNODEFICIENCY VIRUS
FVHFRIGCQ

SEQ ID NO: 14013 - protein, 9 aa, HUMAN IMMUNODEFICIENCY VIRUS
YGDTWTGVE

SEQ ID NO: 14014 - protein, 9 aa, HUMAN IMMUNODEFICIENCY VIRUS
FPRIWLHSL

SEQ ID NO: 14015 - protein, 9 aa, HUMAN IMMUNODEFICIENCY VIRUS
WALELLEEL

SEQ ID NO: 14016 - protein, 9 aa, HUMAN IMMUNODEFICIENCY VIRUS
LVTLLSSSK

SEQ ID NO: 14017 - protein, 9 aa, HUMAN IMMUNODEFICIENCY VIRUS
VTLLSSSKL

SEQ ID NO: 14018 - protein, 9 aa, HUMAN IMMUNODEFICIENCY VIRUS
IIAIVVWTI

SEQ ID NO: 14019 - protein, 9 aa, HUMAN IMMUNODEFICIENCY VIRUS
VDYRIVIVA

SEQ ID NO: 14020 - protein, 9 aa, HUMAN IMMUNODEFICIENCY VIRUS
LRQRKIDRL

SEQ ID NO: 14021 - protein, 9 aa, HUMAN IMMUNODEFICIENCY VIRUS
IVVWTIVFI

SEQ ID NO: 14022 - protein, 9 aa, HUMAN IMMUNODEFICIENCY VIRUS
VVWTIVFIE

SEQ ID NO: 14023 - protein, 9 aa, HUMAN IMMUNODEFICIENCY VIRUS
IEYRKILRQ

SEQ ID NO: 14024 - protein, 9 aa, HUMAN IMMUNODEFICIENCY VIRUS
ILAIVALVV

SEQ ID NO: 14025 - protein, 9 aa, HUMAN IMMUNODEFICIENCY VIRUS
WTIVFIEYR

SEQ ID NO: 14026 - protein, 9 aa, HUMAN IMMUNODEFICIENCY VIRUS
LAIVALVVA

SEQ ID NO: 14027 - protein, 9 aa, HUMAN IMMUNODEFICIENCY VIRUS
VPTDPNPQE

SEQ ID NO: 14028 - protein, 9 aa, HUMAN IMMUNODEFICIENCY VIRUS
YLKDQQLLG

SEQ ID NO: 14029 - protein, 9 aa, HUMAN IMMUNODEFICIENCY VIRUS
MHEDIISLW

SEQ ID NO: 14030 - protein, 9 aa, HUMAN IMMUNODEFICIENCY VIRUS
VSFEPIPIH

SEQ ID NO: 14031 - protein, 9 aa, HUMAN IMMUNODEFICIENCY VIRUS
LAVERYLKD

SEQ ID NO: 14032 - protein, 9 aa, HUMAN IMMUNODEFICIENCY VIRUS
VKIEPLGVA

SEQ ID NO: 14033 - protein, 9 aa, HUMAN IMMUNODEFICIENCY VIRUS
VWKEATTTL

SEQ ID NO: 14034 - protein, 9 aa, HUMAN IMMUNODEFICIENCY VIRUS
LAWDDLRSL

SEQ ID NO: 14035 - protein, 9 aa, HUMAN IMMUNODEFICIENCY VIRUS
LIEESQNQQ

SEQ ID NO: 14036 - protein, 9 aa, HUMAN IMMUNODEFICIENCY VIRUS
LGWEGLKYL

SEQ ID NO: 14037 - protein, 9 aa, HUMAN IMMUNODEFICIENCY VIRUS
LELDKWASL

SEQ ID NO: 14038 - protein, 9 aa, HUMAN IMMUNODEFICIENCY VIRUS
YLRDQQLLG

SEQ ID NO: 14039 - protein, 9 aa, HUMAN IMMUNODEFICIENCY VIRUS
MWQEVGKAM

SEQ ID NO: 14040 - protein, 9 aa, HUMAN IMMUNODEFICIENCY VIRUS
IEEEGGERD

SEQ ID NO: 14041 - protein, 9 aa, HUMAN IMMUNODEFICIENCY VIRUS
MNNENNGTN

SEQ ID NO: 14042 - protein, 9 aa, HUMAN IMMUNODEFICIENCY VIRUS
IEEEGGEQD

SEQ ID NO: 14043 - protein, 9 aa, HUMAN IMMUNODEFICIENCY VIRUS
LAEEEVVIR

SEQ ID NO: 14044 - protein, 9 aa, HUMAN IMMUNODEFICIENCY VIRUS
LALDKWASL

SEQ ID NO: 14045 - protein, 9 aa, HUMAN IMMUNODEFICIENCY VIRUS
LAVERYLRD

SEQ ID NO: 14046 - protein, 9 aa, HUMAN IMMUNODEFICIENCY VIRUS
IRSENLTNN

SEQ ID NO: 14047 - protein, 9 aa, HUMAN IMMUNODEFICIENCY VIRUS
MEWEREIDN

SEQ ID NO: 14048 - protein, 9 aa, HUMAN IMMUNODEFICIENCY VIRUS
INEEAAEWD

SEQ ID NO: 14049 - protein, 9 aa, HUMAN IMMUNODEFICIENCY VIRUS
FSPEVIPMF

SEQ ID NO: 14050 - protein, 9 aa, HUMAN IMMUNODEFICIENCY VIRUS
VLAEAMSQV

SEQ ID NO: 14051 - protein, 9 aa, HUMAN IMMUNODEFICIENCY VIRUS
MLKDTINEE

SEQ ID NO: 14052 - protein, 9 aa, HUMAN IMMUNODEFICIENCY VIRUS
VVEEKAFSP

SEQ ID NO: 14053 - protein, 9 aa, HUMAN IMMUNODEFICIENCY VIRUS
LRAEQATQE

SEQ ID NO: 14054 - protein, 9 aa, HUMAN IMMUNODEFICIENCY VIRUS
MLKETINEE

SEQ ID NO: 14055 - protein, 9 aa, HUMAN IMMUNODEFICIENCY VIRUS
VIEEKAFSP

SEQ ID NO: 14056 - protein, 9 aa, HUMAN IMMUNODEFICIENCY VIRUS
VLAEAMSQA

SEQ ID NO: 14057 - protein, 9 aa, HUMAN IMMUNODEFICIENCY VIRUS
IEEEQNKSK

SEQ ID NO: 14058 - protein, 9 aa, HUMAN IMMUNODEFICIENCY VIRUS
LRAEQATQD

SEQ ID NO: 14059 - protein, 9 aa, HUMAN IMMUNODEFICIENCY VIRUS
LRAEQASQE

SEQ ID NO: 14060 - protein, 9 aa, HUMAN IMMUNODEFICIENCY VIRUS
YFPDWQNYT

SEQ ID NO: 14061 - protein, 9 aa, HUMAN IMMUNODEFICIENCY VIRUS
FLKEKGGLE

SEQ ID NO: 14062 - protein, 9 aa, HUMAN IMMUNODEFICIENCY VIRUS
FLKEKGGLD

SEQ ID NO: 14063 - protein, 9 aa, HUMAN IMMUNODEFICIENCY VIRUS
FFPDWQNYT

SEQ ID NO: 14064 - protein, 9 aa, HUMAN IMMUNODEFICIENCY VIRUS
VSRDLEKHG

SEQ ID NO: 14065 - protein, 9 aa, HUMAN IMMUNODEFICIENCY VIRUS
YMDDLYVGS

SEQ ID NO: 14066 - protein, 9 aa, HUMAN IMMUNODEFICIENCY VIRUS
IGPENPYNT

SEQ ID NO: 14067 - protein, 9 aa, HUMAN IMMUNODEFICIENCY VIRUS
LHPDKWTVQ

SEQ ID NO: 14068 - protein, 9 aa, HUMAN IMMUNODEFICIENCY VIRUS
IVTDSQYAL

SEQ ID NO: 14069 - protein, 9 aa, HUMAN IMMUNODEFICIENCY VIRUS
IPAETGQET

SEQ ID NO: 14070 - protein, 9 aa, HUMAN IMMUNODEFICIENCY VIRUS
LTEEKIKAL

SEQ ID NO: 14071 - protein, 9 aa, HUMAN IMMUNODEFICIENCY VIRUS
IEAEVIPAE

SEQ ID NO: 14072 - protein, 9 aa, HUMAN IMMUNODEFICIENCY VIRUS
LFLDGIDKA

SEQ ID NO: 14073 - protein, 9 aa, HUMAN IMMUNODEFICIENCY VIRUS
VAKEIVASC

SEQ ID NO: 14074 - protein, 9 aa, HUMAN IMMUNODEFICIENCY VIRUS
LKGEAMHGQ

SEQ ID NO: 14075 - protein, 9 aa, HUMAN IMMUNODEFICIENCY VIRUS
VGSDLEIGQ

SEQ ID NO: 14076 - protein, 9 aa, HUMAN IMMUNODEFICIENCY VIRUS
IIRDYGKQM

SEQ ID NO: 14077 - protein, 9 aa, HUMAN IMMUNODEFICIENCY VIRUS
MASDFNLPP

SEQ ID NO: 14078 - protein, 9 aa, HUMAN IMMUNODEFICIENCY VIRUS
FYVDGAANR

SEQ ID NO: 14079 - protein, 9 aa, HUMAN IMMUNODEFICIENCY VIRUS
IHTDNGSNF

SEQ ID NO: 14080 - protein, 9 aa, HUMAN IMMUNODEFICIENCY VIRUS
ILKEPVHGV

SEQ ID NO: 14081 - protein, 9 aa, HUMAN IMMUNODEFICIENCY VIRUS
IYQEPFKNL

SEQ ID NO: 14082 - protein, 9 aa, HUMAN IMMUNODEFICIENCY VIRUS
VYYDPSKDL

SEQ ID NO: 14083 - protein, 9 aa, HUMAN IMMUNODEFICIENCY VIRUS
YVTDRGRQK

SEQ ID NO: 14084 - protein, 9 aa, HUMAN IMMUNODEFICIENCY VIRUS
LTEEAELEL

SEQ ID NO: 14085 - protein, 9 aa, HUMAN IMMUNODEFICIENCY VIRUS
VIQDNSDIK

SEQ ID NO: 14086 - protein, 9 aa, HUMAN IMMUNODEFICIENCY VIRUS
IATDIQTKE

SEQ ID NO: 14087 - protein, 9 aa, HUMAN IMMUNODEFICIENCY VIRUS
INNETPGIR

SEQ ID NO: 14088 - protein, 9 aa, HUMAN IMMUNODEFICIENCY VIRUS
LIAEIQKQG

SEQ ID NO: 14089 - protein, 9 aa, HUMAN IMMUNODEFICIENCY VIRUS
ICTEMEKEG

SEQ ID NO: 14090 - protein, 9 aa, HUMAN IMMUNODEFICIENCY VIRUS
VGAETFYVD

SEQ ID NO: 14091 - protein, 9 aa, HUMAN IMMUNODEFICIENCY VIRUS
IQKETWETW

SEQ ID NO: 14092 - protein, 9 aa, HUMAN IMMUNODEFICIENCY VIRUS
IKQEFGIPY

SEQ ID NO: 14093 - protein, 9 aa, HUMAN IMMUNODEFICIENCY VIRUS
MAGDDCVAG

SEQ ID NO: 14094 - protein, 9 aa, HUMAN IMMUNODEFICIENCY VIRUS
IKKEKVYLA

SEQ ID NO: 14095 - protein, 9 aa, HUMAN IMMUNODEFICIENCY VIRUS
MAGDDCVAS

SEQ ID NO: 14096 - protein, 9 aa, HUMAN IMMUNODEFICIENCY VIRUS
VPLDKDFRK

SEQ ID NO: 14097 - protein, 9 aa, HUMAN IMMUNODEFICIENCY VIRUS
IQQEFGIPY

SEQ ID NO: 14098 - protein, 9 aa, HUMAN IMMUNODEFICIENCY VIRUS
LEKEPIVGA

SEQ ID NO: 14099 - protein, 9 aa, HUMAN IMMUNODEFICIENCY VIRUS
YQLEKEPIV

SEQ ID NO: 14100 - protein, 9 aa, HUMAN IMMUNODEFICIENCY VIRUS
IQKETWEAW

SEQ ID NO: 14101 - protein, 9 aa, HUMAN IMMUNODEFICIENCY VIRUS
FSSEQTRAN

SEQ ID NO: 14102 - protein, 9 aa, HUMAN IMMUNODEFICIENCY VIRUS
IASDIQTKE

SEQ ID NO: 14103 - protein, 9 aa, HUMAN IMMUNODEFICIENCY VIRUS
IATESIVIW

SEQ ID NO: 14104 - protein, 9 aa, HUMAN IMMUNODEFICIENCY VIRUS
ILIEICGKK

SEQ ID NO: 14105 - protein, 9 aa, HUMAN IMMUNODEFICIENCY VIRUS
VLEEINLPG

SEQ ID NO: 14106 - protein, 9 aa, HUMAN IMMUNODEFICIENCY VIRUS
IKKEKVYLS

SEQ ID NO: 14107 - protein, 9 aa, HUMAN IMMUNODEFICIENCY VIRUS
VLEDINLPG

SEQ ID NO: 14108 - protein, 9 aa, HUMAN IMMUNODEFICIENCY VIRUS
VLPEKDSWT

SEQ ID NO: 14109 - protein, 9 aa, HUMAN IMMUNODEFICIENCY VIRUS
VIQDNSEIK

SEQ ID NO: 14110 - protein, 9 aa, HUMAN IMMUNODEFICIENCY VIRUS
IIKDYGKQM

SEQ ID NO: 14111 - protein, 9 aa, HUMAN IMMUNODEFICIENCY VIRUS
VERETETDP

SEQ ID NO: 14112 - protein, 9 aa, HUMAN IMMUNODEFICIENCY VIRUS
LTEDRWNKP

SEQ ID NO: 14113 - protein, 9 aa, HUMAN IMMUNODEFICIENCY VIRUS
YYFDCFSES

SEQ ID NO: 14114 - protein, 9 aa, HUMAN IMMUNODEFICIENCY VIRUS
LVEDRWNKP

SEQ ID NO: 14115 - protein, 9 aa, HUMAN IMMUNODEFICIENCY VIRUS
IDPDLADQL

SEQ ID NO: 14116 - protein, 9 aa, HUMAN IMMUNODEFICIENCY VIRUS
LKNEAVRHF

SEQ ID NO: 14117 - protein, 9 aa, HUMAN IMMUNODEFICIENCY VIRUS
LKSEAVRHF

SEQ ID NO: 14118 - protein, 9 aa, HUMAN IMMUNODEFICIENCY VIRUS
YIYETYGDT

SEQ ID NO: 14119 - protein, 9 aa, HUMAN IMMUNODEFICIENCY VIRUS
LKQEAVRHF

SEQ ID NO: 14120 - protein, 9 aa, HUMAN IMMUNODEFICIENCY VIRUS
MRDNWRSEL

SEQ ID NO: 14121 - protein, 9 aa, HUMAN IMMUNODEFICIENCY VIRUS
LTVQARQLL

SEQ ID NO: 14122 - protein, 9 aa, HUMAN IMMUNODEFICIENCY VIRUS
IEAQQHLLQ

SEQ ID NO: 14123 - protein, 9 aa, HUMAN IMMUNODEFICIENCY VIRUS
IIGDIRQAH

SEQ ID NO: 14124 - protein, 9 aa, HUMAN IMMUNODEFICIENCY VIRUS
VEREKRAVG

SEQ ID NO: 14125 - protein, 9 aa, HUMAN IMMUNODEFICIENCY VIRUS
MVEQMHEDI

SEQ ID NO: 14126 - protein, 9 aa, HUMAN IMMUNODEFICIENCY VIRUS
AWDDLRSLC

SEQ ID NO: 14127 - protein, 9 aa, HUMAN IMMUNODEFICIENCY VIRUS
LEITTHSFN

SEQ ID NO: 14128 - protein, 9 aa, HUMAN IMMUNODEFICIENCY VIRUS
YDTEVHNVW

SEQ ID NO: 14129 - protein, 9 aa, HUMAN IMMUNODEFICIENCY VIRUS
AEGTDRIIE

SEQ ID NO: 14130 - protein, 9 aa, HUMAN IMMUNODEFICIENCY VIRUS
VQREKRAVG

SEQ ID NO: 14131 - protein, 9 aa, HUMAN IMMUNODEFICIENCY VIRUS
AEGTDRVIE

SEQ ID NO: 14132 - protein, 9 aa, HUMAN IMMUNODEFICIENCY VIRUS
IEAQQHLLK

SEQ ID NO: 14133 - protein, 9 aa, HUMAN IMMUNODEFICIENCY VIRUS
LKCNDKKFN

SEQ ID NO: 14134 - protein, 9 aa, HUMAN IMMUNODEFICIENCY VIRUS
ANPDCKTIL

SEQ ID NO: 14135 - protein, 9 aa, HUMAN IMMUNODEFICIENCY VIRUS
FYKTLRAEQ

SEQ ID NO: 14136 - protein, 9 aa, HUMAN IMMUNODEFICIENCY VIRUS
APGQMREPR

SEQ ID NO: 14137 - protein, 9 aa, HUMAN IMMUNODEFICIENCY VIRUS
FFKTLRAEQ

SEQ ID NO: 14138 - protein, 9 aa, HUMAN IMMUNODEFICIENCY VIRUS
IWPSHKGRP

SEQ ID NO: 14139 - protein, 9 aa, HUMAN IMMUNODEFICIENCY VIRUS
LARNCRAPR

SEQ ID NO: 14140 - protein, 9 aa, HUMAN IMMUNODEFICIENCY VIRUS
IAKNCRAPR

SEQ ID NO: 14141 - protein, 9 aa, HUMAN IMMUNODEFICIENCY VIRUS
ATQEVKNWM

SEQ ID NO: 14142 - protein, 9 aa, HUMAN IMMUNODEFICIENCY VIRUS
ATQDVKNWM

SEQ ID NO: 14143 - protein, 9 aa, HUMAN IMMUNODEFICIENCY VIRUS
IARNCRAPR

SEQ ID NO: 14144 - protein, 9 aa, HUMAN IMMUNODEFICIENCY VIRUS
IWPSNKGRP

SEQ ID NO: 14145 - protein, 9 aa, HUMAN IMMUNODEFICIENCY VIRUS
ANPDCKSIL

SEQ ID NO: 14146 - protein, 9 aa, HUMAN IMMUNODEFICIENCY VIRUS
ASQEVKNWM

SEQ ID NO: 14147 - protein, 9 aa, HUMAN IMMUNODEFICIENCY VIRUS
IWPSSKGRP

SEQ ID NO: 14148 - protein, 9 aa, HUMAN IMMUNODEFICIENCY VIRUS
LIYSKKRQE

SEQ ID NO: 14149 - protein, 9 aa, HUMAN IMMUNODEFICIENCY VIRUS
VPVDPREVE

SEQ ID NO: 14150 - protein, 9 aa, HUMAN IMMUNODEFICIENCY VIRUS
MARELHPEY

SEQ ID NO: 14151 - protein, 9 aa, HUMAN IMMUNODEFICIENCY VIRUS
MGYELHPDK

SEQ ID NO: 14152 - protein, 9 aa, HUMAN IMMUNODEFICIENCY VIRUS
FIHNFKRKG

SEQ ID NO: 14153 - protein, 9 aa, HUMAN IMMUNODEFICIENCY VIRUS
MNKELKKII

SEQ ID NO: 14154 - protein, 9 aa, HUMAN IMMUNODEFICIENCY VIRUS
IIGQVRDQA

SEQ ID NO: 14155 - protein, 9 aa, HUMAN IMMUNODEFICIENCY VIRUS
YHSNWRAMA

SEQ ID NO: 14156 - protein, 9 aa, HUMAN IMMUNODEFICIENCY VIRUS
MEKEGKISK

SEQ ID NO: 14157 - protein, 9 aa, HUMAN IMMUNODEFICIENCY VIRUS
YYRDSRDPI

SEQ ID NO: 14158 - protein, 9 aa, HUMAN IMMUNODEFICIENCY VIRUS
ANRETKLGK

SEQ ID NO: 14159 - protein, 9 aa, HUMAN IMMUNODEFICIENCY VIRUS
IGGQLKEAL

SEQ ID NO: 14160 - protein, 9 aa, HUMAN IMMUNODEFICIENCY VIRUS
LDKDFRKYT

SEQ ID NO: 14161 - protein, 9 aa, HUMAN IMMUNODEFICIENCY VIRUS
YYRDSRDPL

SEQ ID NO: 14162 - protein, 9 aa, HUMAN IMMUNODEFICIENCY VIRUS
IIGQVREQA

SEQ ID NO: 14163 - protein, 9 aa, HUMAN IMMUNODEFICIENCY VIRUS
YHNNWRAMA

SEQ ID NO: 14164 - protein, 9 aa, HUMAN IMMUNODEFICIENCY VIRUS
ARRNRRRRW

SEQ ID NO: 14165 - protein, 9 aa, HUMAN IMMUNODEFICIENCY VIRUS
ARKNRRRRW

SEQ ID NO: 14166 - protein, 9 aa, HUMAN IMMUNODEFICIENCY VIRUS
LLKTVRLIK

SEQ ID NO: 14167 - protein, 9 aa, HUMAN IMMUNODEFICIENCY VIRUS
ISSEVHIPL

SEQ ID NO: 14168 - protein, 9 aa, HUMAN IMMUNODEFICIENCY VIRUS
VSSEVHIPL

SEQ ID NO: 14169 - protein, 9 aa, HUMAN IMMUNODEFICIENCY VIRUS
VSIEWRLRR

SEQ ID NO: 14170 - protein, 9 aa, HUMAN IMMUNODEFICIENCY VIRUS
LPSNTRGRG

SEQ ID NO: 14171 - protein, 9 aa, HUMAN IMMUNODEFICIENCY VIRUS
LLEELKNEA

SEQ ID NO: 14172 - protein, 9 aa, HUMAN IMMUNODEFICIENCY VIRUS
LLEELKSEA

SEQ ID NO: 14173 - protein, 9 aa, HUMAN IMMUNODEFICIENCY VIRUS
AKVDYRIVI

SEQ ID NO: 14174 - protein, 9 aa, HUMAN IMMUNODEFICIENCY VIRUS
AKVDYRLGV

SEQ ID NO: 14175 - protein, 9 aa, HUMAN IMMUNODEFICIENCY VIRUS
ILRQRKIDR

SEQ ID NO: 14176 - protein, 9 aa, HUMAN IMMUNODEFICIENCY VIRUS
LTFGWCFKL

SEQ ID NO: 14177 - protein, 10 aa, HUMAN IMMUNODEFICIENCY VIRUS
MASDFNLPPV

SEQ ID NO: 14178 - protein, 9 aa, HUMAN IMMUNODEFICIENCY VIRUS
VLAEAMSQV

SEQ ID NO: 14179 - protein, 10 aa, HUMAN IMMUNODEFICIENCY VIRUS
CTLNFPISPI

SEQ ID NO: 14180 - protein, 9 aa, HUMAN IMMUNODEFICIENCY VIRUS
LLQLTVWGI

SEQ ID NO: 14181 - protein, 9 aa, HUMAN IMMUNODEFICIENCY VIRUS
KLVGKLNWA

SEQ ID NO: 14182 - protein, 9 aa, HUMAN IMMUNODEFICIENCY VIRUS
KLTPLCVTL

SEQ ID NO: 14183 - protein, 9 aa, HUMAN IMMUNODEFICIENCY VIRUS
ALVEICTEM

SEQ ID NO: 14184 - protein, 9 aa, HUMAN IMMUNODEFICIENCY VIRUS
AIIRILQQL

SEQ ID NO: 14185 - protein, 9 aa, HUMAN IMMUNODEFICIENCY VIRUS
LVGPTPVNI

SEQ ID NO: 14186 - protein, 9 aa, HUMAN IMMUNODEFICIENCY VIRUS
RILQQLLFI

SEQ ID NO: 14187 - protein, 9 aa, HUMAN IMMUNODEFICIENCY VIRUS
TLNFPISPI

SEQ ID NO: 14188 - protein, 9 aa, HUMAN IMMUNODEFICIENCY VIRUS
MTNNPPIPV

SEQ ID NO: 14189 - protein, 10 aa, HUMAN IMMUNODEFICIENCY VIRUS
KMIGGIGGFI

SEQ ID NO: 14190 - protein, 9 aa, HUMAN IMMUNODEFICIENCY VIRUS
ILKEPVHGV

SEQ ID NO: 14191 - protein, 9 aa, HUMAN IMMUNODEFICIENCY VIRUS
RAMASDFNL

SEQ ID NO: 14192 - protein, 9 aa, HUMAN IMMUNODEFICIENCY VIRUS
KAACWWAGI

SEQ ID NO: 14193 - protein, 10 aa, HUMAN IMMUNODEFICIENCY VIRUS
KIQNFRVYYR

SEQ ID NO: 14194 - protein, 9 aa, HUMAN IMMUNODEFICIENCY VIRUS
AVFIHNFKR

SEQ ID NO: 14195 - protein, 10 aa, HUMAN IMMUNODEFICIENCY VIRUS
QMAVFIHNFK

SEQ ID NO: 14196 - protein, 9 aa, HUMAN IMMUNODEFICIENCY VIRUS
MAVFIHNFK

SEQ ID NO: 14197 - protein, 11 aa, HUMAN IMMUNODEFICIENCY VIRUS
KVYLAWVPAHK

SEQ ID NO: 14198 - protein, 9 aa, HUMAN IMMUNODEFICIENCY VIRUS
AIFQSSMTK

SEQ ID NO: 14199 - protein, 10 aa, HUMAN IMMUNODEFICIENCY VIRUS
QVPLRPMTYK

SEQ ID NO: 14200 - protein, 10 aa, HUMAN IMMUNODEFICIENCY VIRUS
TTLFCASDAK

SEQ ID NO: 14201 - protein, 10 aa, HUMAN IMMUNODEFICIENCY VIRUS
VTIKIGGQLK

SEQ ID NO: 14202 - protein, 10 aa, HUMAN IMMUNODEFICIENCY VIRUS
TVYYGVPVWK

SEQ ID NO: 14203 - protein, 11 aa, HUMAN IMMUNODEFICIENCY VIRUS
VTVYYGVPVWK

SEQ ID NO: 14204 - protein, 14 aa, HUMAN IMMUNODEFICIENCY VIRUS
KRWILGLNKIVRMY

SEQ ID NO: 14205 - protein, 14 aa, HUMAN IMMUNODEFICIENCY VIRUS
GEIYKRWILGLNKI

SEQ ID NO: 14206 - protein, 15 aa, HUMAN IMMUNODEFICIENCY VIRUS
WEFVNTPPLVKLWYQ

SEQ ID NO: 14207 - protein, 15 aa, HUMAN IMMUNODEFICIENCY VIRUS
QKQITKIQNFRVYYR

SEQ ID NO: 14208 - protein, 15 aa, HUMAN IMMUNODEFICIENCY VIRUS
KVYLAWVPAHKGIGG

SEQ ID NO: 14209 - protein, 15 aa, HUMAN IMMUNODEFICIENCY VIRUS
EKVYLAWVPAHKGIG

SEQ ID NO: 14210 - protein, 15 aa, HUMAN IMMUNODEFICIENCY VIRUS
QGQMVHQAISPRTLN

SEQ ID NO: 14211 - protein, 15 aa, HUMAN IMMUNODEFICIENCY VIRUS
SPAIFQSSMTKILEP

SEQ ID NO: 14212 - protein, 15 aa, HUMAN IMMUNODEFICIENCY VIRUS
FRKYTAFTIPSINNE

SEQ ID NO: 14213 - protein, 15 aa, HUMAN IMMUNODEFICIENCY VIRUS
HSNWRAMASDFNLPP

SEQ ID NO: 14214 - protein, 15 aa, HUMAN IMMUNODEFICIENCY VIRUS
KTAVQMAVFIHNFKR

SEQ ID NO: 14215 - protein, 9 aa, HUMAN IMMUNODEFICIENCY VIRUS
YTAVVPLVY

SEQ ID NO: 14216 - protein, 10 aa, HUMAN IMMUNODEFICIENCY VIRUS
FLPSDYFPSV

SEQ ID NO: 14217 - protein, 10 aa, HUMAN IMMUNODEFICIENCY VIRUS
FLPSDYFPSV

SEQ ID NO: 14218 - protein, 10 aa, HUMAN IMMUNODEFICIENCY VIRUS
FLPSDYFPSV

SEQ ID NO: 14219 - protein, 10 aa, HUMAN IMMUNODEFICIENCY VIRUS
FLPSDYFPSV

SEQ ID NO: 14220 - protein, 10 aa, HUMAN IMMUNODEFICIENCY VIRUS
FLPSDYFPSV

SEQ ID NO: 14221 - protein, 10 aa, HUMAN IMMUNODEFICIENCY VIRUS
KVFPYALINK

SEQ ID NO: 14222 - protein, 10 aa, HUMAN IMMUNODEFICIENCY VIRUS
KVFPYALINK

SEQ ID NO: 14223 - protein, 9 aa, HUMAN IMMUNODEFICIENCY VIRUS
AYIDNYNKF

SEQ ID NO: 14224 - protein, 10 aa, HUMAN IMMUNODEFICIENCY VIRUS
KVFPYALINK

SEQ ID NO: 14225 - protein, 10 aa, hUMAN iMMUNODEFICIENCY VIRUS
KVFPYALINK

SEQ ID NO: 14226 - protein, 11 aa, HUMAN IMMUNODEFICIENCY VIRUS
STLPETYVVRR

SEQ ID NO: 14227 - protein, 9 aa, HUMAN IMMUNODEFICIENCY VIRUS
FTQAGYPAL

SEQ ID NO: 14228 - protein, 9 aa, HUMAN IMMUNODEFICIENCY VIRUS
APRTLVYLL

SEQ ID NO: 14229 - protein, 8 aa, HUMAN IMMUNODEFICIENCY VIRUS
FLKDYQLL

SEQ ID NO: 14230 - protein, 9 aa, HUMAN IMMUNODEFICIENCY VIRUS
FRYNGLIHR

SEQ ID NO: 14231 - protein, 9 aa, HUMAN IMMUNODEFICIENCY VIRUS
FPFKYAAAF

SEQ ID NO: 14232 - protein, 9 aa, HUMAN IMMUNODEFICIENCY VIRUS
FPFKYAAAF

SEQ ID NO: 14233 - protein, 9 aa, HUMAN IMMUNODEFICIENCY VIRUS
FPFKYAAAF

SEQ ID NO: 14234 - protein, 9 aa, HUMAN IMMUNODEFICIENCY VIRUS
AEMGKYSFY

SEQ ID NO: 14235 - protein, 9 aa, HUMAN IMMUNODEFICIENCY VIRUS
FPFKYAAAF

SEQ ID NO: 14236 - protein, 9 aa, HUMAN IMMUNODEFICIENCY VIRUS
FPFKYAAAF

SEQ ID NO: 14237 - protein, 9 aa, HUMAN IMMUNODEFICIENCY VIRUS
FPFKYAAAF

SEQ ID NO: 14238 - protein, 9 aa, HUMAN IMMUNODEFICIENCY VIRUS
QYDDAVYKL

SEQ ID NO: 14239 - protein, 9 aa, HUMAN IMMUNODEFICIENCY VIRUS
YRHDGGNVL

SEQ ID NO: 14240 - protein, 9 aa, HUMAN IMMUNODEFICIENCY VIRUS
YRHDGGNVL

SEQ ID NO: 14241 - protein, 10 aa, HUMAN IMMUNODEFICIENCY VIRUS
SGPSNTYPEI

SEQ ID NO: 14242 - protein, 8 aa, HUMAN IMMUNODEFICIENCY VIRUS
RGYVFQGL

SEQ ID NO: 14243 - protein, 10 aa, HUMAN IMMUNODEFICIENCY VIRUS
RGPYRAFVTI

SEQ ID NO: 14244 - protein, 9 aa, HUMAN IMMUNODEFICIENCY VIRUS
KFNPMKTYI

SEQ ID NO: 14245 - protein, 12 aa, HUMAN IMMUNODEFICIENCY VIRUS
IPQSLDSYWTSL

SEQ ID NO: 14246 - protein, 13 aa, HUMAN IMMUNODEFICIENCY VIRUS
YPKYVKQNTKLAT

SEQ ID NO: 14247 - protein, 16 aa, HUMAN IMMUNODEFICIENCY VIRUS
VVHFFKNIVTPRTPPY

SEQ ID NO: 14248 - protein, 14 aa, HUMAN IMMUNODEFICIENCY VIRUS
YAAFAAAKTAAAFA

SEQ ID NO: 14249 - protein, 12 aa, HUMAN IMMUNODEFICIENCY VIRUS
YKTIAFDEEARR

SEQ ID NO: 14250 - protein, 14 aa, HUMAN IMMUNODEFICIENCY VIRUS
YARFQSQTTLKQKT

SEQ ID NO: 14251 - protein, 14 aa, HUMAN IMMUNODEFICIENCY VIRUS
YARFQRQTTLKAAA

SEQ ID NO: 14252 - protein, 14 aa, HUMAN IMMUNODEFICIENCY VIRUS
YARFQSQTTLKQKT

SEQ ID NO: 14253 - skipped

SEQ ID NO: 14254 - protein, 14 aa, HUMAN IMMUNODEFICIENCY VIRUS
QYIKANSKFIGITE

SEQ ID NO: 14255 - protein, 14 aa, HUMAN IMMUNODEFICIENCY VIRUS
QYIKANSKFIGITE

SEQ ID NO: 14256 - protein, 14 aa, HUMAN IMMUNODEFICIENCY VIRUS
QYIKANSKFIGITE

SEQ ID NO: 14257 - protein, 14 aa, HUMAN IMMUNODEFICIENCY VIRUS
QYIKANSKFIGITE

SEQ ID NO: 14258 - protein, 14 aa, HUMAN IMMUNODEFICEINCY VIRUS
QYIKANSKFIGITE

SEQ ID NO: 14259 - protein, 15 aa, HUMAN IMMUNODEFICIENCY VIRUS
EALIHQLKINPYVLS

SEQ ID NO: 14260 - protein, 14 aa, HUMAN IMMUNODEFICIENCY VIRUS
QYIKANAKFIGITE

SEQ ID NO: 14261 - protein, 14 aa, HUMAN IMMUNODEFICIENCY VIRUS
QYIKANAKFIGITE

SEQ ID NO: 14262 - protein, 13 aa, HUMAN IMMUNODEFICIENCY VIRUS
PKYVKQNTLKLAT

SEQ ID NO: 14263 - protein, 13 aa, HUMAN IMMUNODEFICIENCY VIRUS
NGQIGNDPNRDIL

SEQ ID NO: 14264 - protein, 14 aa, HUMAN IMMUNODEFICIENCY VIRUS
YARFQSQTTLKQKT

SEQ ID NO: 14265 - protein, 17 aa, HUMAN IMMUNODEFICIENCY VIRUS
YAHAAHAAHAAHAAHAA

SEQ ID NO: 14266 - protein, 17 aa, HUMAN IMMUNODEFICIENCY VIRUS
YAHAAHAAHAAHAAHAA

SEQ ID NO: 14267 - protein, 17 aa, HUMAN IMMUNODEFICIENCY VIRUS
YAHAAHAAHAAHAAHAA

SEQ ID NO: 14268 - protein, 17 aa, HUMAN IMMUNODEFICIENCY VIRUS
YNTDGSTDYGILQINSR

SEQ ID NO: 14269 - protein, 17 aa, HUMAN IMMUNODEFICIENCY VIRUS
YAHAAHAAHAAHAAHAA

SEQ ID NO: 14270 - protein, 17 aa, HUMAN IMMUNODEFICIENCY VIRUS
YAHAAHAAHAAHAAHAA

SEQ ID NO: 14271 - protein, 16 aa, HUMAN IMMUNODEFICIENCY VIRUS
YLEDARRKKAIYEKKK

SEQ ID NO: 14272 - protein, 16 aa, HUMAN IMMUNODEFICIENCY VIRUS
YLEDARRKKAIYEKKK

SEQ ID NO: 14273 - protein, 10 aa, HUMAN IMMUNODEFICIENCY VIRUS
LTFGWCFKLV

SEQ ID NO: 14274 - protein, 9 aa, HUMAN IMMUNODEFICIENCY VIRUS
LTFGWCFKL

SEQ ID NO: 14275 - protein, 9 aa, HUMAN IMMUNODEFICIENCY VIRUS
YTAFTIPSI

SEQ ID NO: 14276 - protein, 10 aa, HUMAN IMMUNODEFICIENCY VIRUS
MASDFNLPPV

SEQ ID NO: 14277 - protein, 9 aa, HUMAN IMMUNODEFICIENCY VIRUS
VLAEAMSQV

SEQ ID NO: 14278 - protein, 10 aa, HUMAN IMMUNODEFICIENCY VIRUS
CTLNFPISPI

SEQ ID NO: 14279 - protein, 9 aa, HUMAN IMMUNODEFICIENCY VIRUS
LLQLTVWGI

SEQ ID NO: 14280 - protein, 9 aa, HUMAN IMMUNODEFICIENCY VIRUS
KLVGKLNWA

SEQ ID NO: 14281 - protein, 9 aa, HUMAN IMMUNODEFICIENCY VIRUS
KLTPLCVTL

SEQ ID NO: 14282 - protein, 9 aa, HUMAN IMMUNODEFICIENCY VIRUS
ALVEICTEM

SEQ ID NO: 14283 - protein, 9 aa, HUMAN IMMUNODEFICIENCY VIRUS
AIIRILQQL

SEQ ID NO: 14284 - protein, 9 aa, HUMAN IMMUNODEFICIENCY VIRUS
LVGPTPVNI

SEQ ID NO: 14285 - protein, 9 aa, HUMAN IMMUNODEFICIENCY VIRUS
RILQQLLFI

SEQ ID NO: 14286 - protein, 9 aa, HUMAN IMMUNODEFICIENCY VIRUS
TLNFPISPI

SEQ ID NO: 14287 - protein, 9 aa, HUMAN IMMUNODEFICIENCY VIRUS
MTNNPPIPV

SEQ ID NO: 14288 - protein, 10 aa, HUMAN IMMUNODEFICIENCY VIRUS
KMIGGIGGFI

SEQ ID NO: 14289 - protein, 9 aa, HUMAN IMMUNODEFICIENCY VIRUS
ILKEPVHGV

SEQ ID NO: 14290 - protein, 9 aa, HUMAN IMMUNODEFICIENCY VIRUS
RAMASDFNL

SEQ ID NO: 14291 - protein, 9 aa, HUMAN IMMUNODEFICIENCY VIRUS
KAACWWAGI

SEQ ID NO: 14292 - protein, 10 aa, HUMAN IMMUNODEFICIENCY VIRUS
SLLNATDIAV

SEQ ID NO: 14293 - protein, 9 aa, HUMAN IMMUNODEFICIENCY VIRUS
FLGAAGSTM

SEQ ID NO: 14294 - protein, 10 aa, HUMAN IMMUNODEFICIENCY VIRUS
QLLFIHFFRI

SEQ ID NO: 14295 - protein, 10 aa, HUMAN IMMUNODEFICIENCY VIRUS
WMTNNPPIPV

SEQ ID NO: 14296 - protein, 10 aa, HUMAN IMMUNODEFICIENCY VIRUS
LLWKGEGAVV

SEQ ID NO: 14297 - protein, 10 aa, HUMAN IMMUNODEFICIENCY VIRUS
PLTFGWCFKL

SEQ ID NO: 14298 - protein, 9 aa, HUMAN IMMUNODEFICIENCY VIRUS
LLWKGEGAV

SEQ ID NO: 14299 - protein, 10 aa, HUMAN IMMUNODEFICIENCY VIRUS
KLNWASQIYA

SEQ ID NO: 14300 - protein, 9 aa, HUMAN IMMUNODEFICIENCY VIRUS
SLYNTVATL

SEQ ID NO: 14301 - protein, 9 aa, HUMAN IMMUNODEFICIENCY VIRUS
FLQSRPEPT

SEQ ID NO: 14302 - protein, 9 aa, HUMAN IMMUNODEFICIENCY VIRUS
TLWQRPLVT

SEQ ID NO: 14303 - protein, 9 aa, HUMAN IMMUNODEFICIENCY VIRUS
MVHQAISPR

SEQ ID NO: 14304 - protein, 9 aa, HUMAN IMMUNODEFICIENCY VIRUS
IVIWGKTPK

SEQ ID NO: 14305 - protein, 9 aa, HUMAN IMMUNODEFICIECNY VIRUS
AVFIHNFKR

SEQ ID NO: 14306 - protein, 9 aa, HUMAN IMMUNODEFICIENCY VIRUS
YLAWVPAHK

SEQ ID NO: 14307 - protein, 10 aa, HUMAN IMMUNODEFICIENCY VIRUS
KIQNFRVYYR

SEQ ID NO: 14308 - protein, 10 aa, HUMAN IMMUNODEFICIENCY VIRUS
QMAVFIHNFK

SEQ ID NO: 14309 - protein, 10 aa, HUMAN IMMUNODEFICIENCY VIRUS
QMVHQAISPR

SEQ ID NO: 14310 - protein, 9 aa, HUMAN IMMUNODEFICIENCY VIRUS
MTKILEPFR

SEQ ID NO: 14311 - protein, 9 aa, HUMAN IMMUNODEFICIENCY VIRUS
AIFQSSMTK

SEQ ID NO: 14312 - protein, 10 aa, HUMAN IMMUNODEFICIENCY VIRUS
QVPLRPMTYK

SEQ ID NO: 14313 - protein, 10 aa, HUMAN IMMUNODEFICIENCY VIRUS
TVYYGVPVWK

SEQ ID NO: 14314 - protein, 10 aa, HUMAN IMMUNODEFICIENCY VIRUS
AVFIHNFKRK

SEQ ID NO: 14315 - protein, 9 aa, HUMAN IMMUNODEFICIENCY VIRUS
TIKIGGQLK

SEQ ID NO: 14316 - protein, 9 aa, HUMAN IMMUNODEFICIENCY VIRUS
TLFCASDAK

SEQ ID NO: 14317 - protein, 10 aa, HUMAN IMMUNODEFICIENCY VIRUS
TTLFCASDAK

SEQ ID NO: 14318 - protein, 9 aa, HUMAN IMMUNODEFICIENCY VIRUS
RIVELLGRR

SEQ ID NO: 14319 - protein, 10 aa, HUMAN IMMUNODEFICIENCY VIRUS
VTIKIGGQLK

SEQ ID NO: 14320 - protein, 9 aa, HUMAN IMMUNODEFICIENCY VIRUS
NTPVFAIKK

SEQ ID NO: 14321 - protein, 9 aa, HUMAN IMMUNODEFICIENCY VIRUS
MAVFIHNFK

SEQ ID NO: 14322 - protein, 9 aa, HUMAN IMMUNODEFICIENCY VIRUS
VMIVWQVDR

SEQ ID NO: 14323 - protein, 11 aa, HUMAN IMMUNODEFICIENCY VIRUS
VTVYYGVPVWK

SEQ ID NO: 14324 - protein, 11 aa, HUMAN IMMUNODEFICIENCY VIRUS
KVYLAWVPAHK

SEQ ID NO: 14325 - protein, 9 aa, HUMAN IMMUNODEFICIENCY VIRUS
KLAGRWPVK

SEQ ID NO: 14326 - protein, 9 aa, HUMAN IMMUNODEFICIENCY VIRUS
FPVRPQVPL

SEQ ID NO: 14327 - protein, 9 aa, HUMAN IMMUNODEFICIENCY VIRUS
IPIHYCAPA

SEQ ID NO: 14328 - protein, 10 aa, HUMAN IMMUNODEFICIENCY VIRUS
YPLASLRSLF

SEQ ID NO: 14329 - protein, 9 aa, HUMAN IMMUNODEFICIENCY VIRUS
FPISPIETV

SEQ ID NO: 14330 - protein, 9 aa, HUMAN IMMUNODEFICIENCY VIRUS
CPKVSFEPI

SEQ ID NO: 14331 - protein, 11 aa, HUMAN IMMUNODEFICIENCY VIRUS
IPYNPQSQGVV

SEQ ID NO: 14332 - protein, 8 aa, HUMAN IMMUNODEFICIENCY VIRUS
VPLQLPPL

SEQ ID NO: 14333 - protein, 9 aa, HUMAN IMMUNODEFICIENCY VIRUS
HPVHAGPIA

SEQ ID NO: 14334 - protein, 10 aa, HUMAN IMMUNODEFICIENCY VIRUS
EVNIVTDSQY

SEQ ID NO: 14335 - protein, 9 aa, HUMAN IMMUNODEFICIENCY VIRUS
FRDYVDRFY

SEQ ID NO: 14336 - protein, 9 aa, HUMAN IMMUNODEFICIENCY VIRUS
IYQYMDDLY

SEQ ID NO: 14337 - protein, 10 aa, HUMAN IMMUNODEFICIENCY VIRUS
VIYQYMDDLY

SEQ ID NO: 14338 - protein, 10 aa, HUMAN IMMUNODEFICIENCY VIRUS
VTVLDVGDAY

SEQ ID NO: 14339 - protein, 9 aa, HUMAN IMMUNODEFICIENCY VIRUS
IWGCSGKLI

SEQ ID NO: 14340 - protein, 9 aa, HUMAN IMMUNODEFICIENCY VIRUS
IYETYGDTW

SEQ ID NO: 14341 - protein, 9 aa, HUMAN IMMUNODEFICIENCY VIRUS
IYQEPFKNL

SEQ ID NO: 14342 - protein, 9 aa, HUMAN IMMUNODEFICIENCY VIRUS
PYNEWTLEL

SEQ ID NO: 14343 - protein, 9 aa, HUMAN IMMUNODEFICIENCY VIRUS
PYNTPVFAI

SEQ ID NO: 14344 - protein, 9 aa, HUMAN IMMUNODEFICNCY VIRUS
RYLKDQQLL

SEQ ID NO: 14345 - protein, 9 aa, HUMAN IMMUNODEFICIENCY VIRUS
RYLRDQQLL

SEQ ID NO: 14346 - protein, 10 aa, HUMAN IMMUNODEFICIENCY VIRUS
TYQIYQEPPF

SEQ ID NO: 14347 - protein, 9 aa, HUMAN IMMUNODEFICIENCY VIRUS
VWKEATTTL

SEQ ID NO: 14348 - protein, 10 aa, HUMAN IMMUNODEFICIENCY VIRUS
VWKEATTTLF

SEQ ID NO: 14349 - protein, 10 aa, HUMAN IMMUNODEFICIENCY VIRUS
YWQATWIPEW

SEQ ID NO: 14350 - protein, 10 aa, HUMAN IMMUNODEFICIENCY VIRUS
LTFGWCFKLV

SEQ ID NO: 14351 - protein, 9 aa, HUMAN IMMUNODEFICIENCY VIRUS
LTFGWCFKL

SEQ ID NO: 14352 - protein, 9 aa, HUMAN IMMUNODEFICIENCY VIRUS
YTAFTIPSI

SEQ ID NO: 14353 - protein, 10 aa, HUMAN IMMUNODEFICIENCY VIRUS
MASDFNLPPV

SEQ ID NO: 14354 - protein, 9 aa, HUMAN IMMUNODEFICIENCY VIRUS
VLAEAMSQV

SEQ ID NO: 14355 - protein, 10 aa, HUMAN IMMUNODEFICIENCY VIRUS
CTLNFPISPI

SEQ ID NO: 14356 - protein, 9 aa, HUMAN IMMUNODEFICIENCY VIRUS
LLQLTVWGI

SEQ ID NO: 14357 - protein, 9 aa, HUMAN IMMUNODEFICIENCY VIRUS
KLVGKLNWA

SEQ ID NO: 14358 - protein, 9 aa, HUMAN IMMUNODEFICIENCY VIRUS
KLTPLCVTL

SEQ ID NO: 14359 - protein, 9 aa, HUMAN IMMUNODEFICIENCY VIRUS
ALVEICTEM

SEQ ID NO: 14360 - protein, 9 aa, HUMAN IMMUNODEFICIENCY VIRUS
AIIRILQQL

SEQ ID NO: 14361 - protein, 9 aa, HUMAN IMMUNODEFICIENCY VIRUS
LVGPTPVNI

SEQ ID NO: 14362 - protein, 9 aa, HUMAN IMMUNODEFICIENCY VIRUS
RILQQLLFI

SEQ ID NO: 14363 - protein, 9 aa, HUMAN IMMUNODEFICIENCY VIRUS
TLNFPISPI

SEQ ID NO: 14364 - protein, 9 aa, HUMAN IMMUNODEFICIENCY VIRUS
MTNNPPIPV

SEQ ID NO: 14365 - protein, 10 aa, HUMAN IMMUNODEFICIENCY VIRUS
KMIGGIGGFI

SEQ ID NO: 14366 - protein, 9 aa, HUMAN IMMUNODEFICIENCY VIRUS
ILKEPVHGV

SEQ ID NO: 14367 - protein, 9 aa, HUMAN IMMUNODEFICIENCY VIRUS
RAMASDFNL

SEQ ID NO: 14368 - protein, 9 aa, HUMAN IMMUNODEFICIENCY VIRUS
KAACWWAGI

SEQ ID NO: 14369 - protein, 10 aa, HUMAN IMMUNODEFICIENCY VIRUS
SLLNATDIAV

SEQ ID NO: 14370 - protein, 10 aa, HUMAN IMMUNODEFICIENCY VIRUS
KIQNFRVYYR

SEQ ID NO: 14371 - protein, 9 aa, HUMAN IMMUNODEFICIENCY VIRUS
IVIWGKTPK

SEQ ID NO: 14372 - protein, 9 aa, HUMAN IMMUNODEFICIENCY VIRUS
AVFIHNFKR

SEQ ID NO: 14373 - protein, 10 aa, HUMAN IMMUNODEFICIENCY VIRUS
QMAVFIHNFK

SEQ ID NO: 14374 - protein, 9 aa, HUMAN IMMUNODEFICIENCY VIRUS
MAVFIHNFK

SEQ ID NO: 14375 - protein, 10 aa, HUMAN IMMUNODEFICIENCY VIRUS
AVFIHNFKRK

SEQ ID NO: 14376 - protein, 9 aa, HUMAN IMMUNODEFICIENCY VIRUS
MVHQAISPR

SEQ ID NO: 14377 - protein, 10 aa, HUMAN IMMUNODEFICIENCY VIRUS
QMVHQAISPR

SEQ ID NO: 14378 - protein, 9 aa, HUMAN IMMUNODEFICIENCY VIRUS
YLAWVPAHK

SEQ ID NO: 14379 - protein, 10 aa, HUMAN IMMUNODEFICIENCY VIRUS
KVLAWVPAHK

SEQ ID NO: 14380 - protein, 9 aa, HUMAN IMMUNODEFICIRNCY VIRUS
MTKILEPFR

SEQ ID NO: 14381 - protein, 9 aa, HUMAN IMMUNODEFICIENCY VIRUS
AIFQSSMTK

SEQ ID NO: 14382 - protein, 10 aa, HUMAN IMMUNODEFICIENCY VIRUS
QVPLRPMTYK

SEQ ID NO: 14383 - protein, 9 aa, HUMAN IMMUNODEFICIENCY VIRUS
KLAGRWPVK

SEQ ID NO: 14384 - protein, 9 aa, HUMAN IMMUNODEFICIENCY VIRUS
NTPVFAIKK

SEQ ID NO: 14385 - protein, 9 aa, HUMAN IMMUNODEFICIENCY VIRUS
VMIVWQVDR

SEQ ID NO: 14386 - protein, 9 aa, HUMAN IMMUNODEFICIENCY VIRUS
RIVELLGRR

SEQ ID NO: 14387 - protein, 10 aa, HUMAN IMMUNODEFICIENCY VIRUS
TTLFCASDAK

SEQ ID NO: 14388 - protein, 9 aa, HUMAN IMMUNODEFICIENCY VIRUS
TLFCASDAK

SEQ ID NO: 14389 - protein, 10 aa, HUMAN IMMUNODEFICIENCY VIRUS
VTIKIGGQLK

SEQ ID NO: 14390 - protein, 9 aa, HUMAN IMMUNODEFICIENCY VIRUS
TIKIGGQLK

SEQ ID NO: 14391 - protein, 10 aa, HUMAN IMMUNODEFICIENCY VIRUS
TVYYGVPVWK

SEQ ID NO: 14392 - protein, 11 aa, HUMAN IMMUNODEFICIENCY VIRUS
VTVYYGVPVWK

SEQ ID NO: 14393 - protein, 15 aa, HUMAN IMMUNODEFICIENCY VIRUS
KRWIILGLNKIVRMY

SEQ ID NO: 14394 - protein, 15 aa, HUMAN IMMUNODEFICIENCY VIRUS
WEFVNTPPLVKLWYQ

SEQ ID NO: 14395 - protein, 15 aa, HUMAN IMMUNODEFICIENCY VIRUS
QKQITKIQNFRVYYR

SEQ ID NO: 14396 - protein, 15 aa, HUMAN IMMUNODEFICIENCY VIRUS
KVYLAWVPAHKGIGG

SEQ ID NO: 14397 - protein, 15 aa, HUMAN IMUNOIDEFICIENCY VIRUS
GEIYKRWIILGLNKI

SEQ ID NO: 14398 - protein, 15 aa, HUMAN IMMUNODEFICIENCY VIRUS
EKVYLAWVPAHKGIG

SEQ ID NO: 14399 - protein, 15 aa, HUMAN IMMUNODEFICIENCY VIRUS
QHLLQLTVWGIKQLQ

SEQ ID NO: 14400 - protein, 15 aa, HUMAN IMMUNODEFICIENCY VIRUS
QGQMVHQAISPRTLN

SEQ ID NO: 14401 - protein, 15 aa, HUMAN IMMUNODEFICIENCY VIRUS
SPAIFQSSMTKILEP

SEQ ID NO: 14402-14403 - skipped (2 entries)

SEQ ID NO: 14404 - protein, 15 aa, HUMAN IMMUNODEFICIENCY VIRUS
HSNWRAMASDFNLPP

SEQ ID NO: 14405 - protein, 15 aa, HUMAN IMMUNODEFICIENCY VIRUS
KTAVQMAVFIHNFKR

SEQ ID NO: 14406 - protein, 15 aa, HUMAN IMMUNODEFICIENCY VIRUS
YRKILRQRKIDRLID

SEQ ID NO: 14407 - protein, 15 aa, HUMAN IMMUNODEFICIENCY VIRUS
WAGIKQEFGIPYNPQ

SEQ ID NO: 14408 - protein, 14 aa, HUMAN IMMUNODEFICIENCY VIRUS
EVNIVTDSYALGII

SEQ ID NO: 14409 - protein, 15 aa, HUMAN IMMUNODEFICIENCY VIRUS
AETFYVDGAANRETK

SEQ ID NO: 14410 - protein, 15 aa, HUMAN IMMUNODEFICIENCY VIRUS
GAVVIQDNSDIKVVP

SEQ ID NO: 14411 - protein, 15 aa, HUMAN IMMUNODEFICIENCY VIRUS
KRWIILGLNKIVRMY

SEQ ID NO: 14412 - protein, 15 aa, HUMAN IMMUNODEFICIENCY VIRUS
GEIYKRWIILGLNKI

SEQ ID NO: 14413 - protein, 15 aa, HUMAN IMMUNODEFICIENCY VIRUS
WEFVNTPPLVKLWYQ

SEQ ID NO: 14414 - protein, 15 aa, HUMAN IMMUNODEFICIENCY VIRUS
QKQITKIQNFRVYYR

SEQ ID NO: 14415 - protein, 15 aa, HUMAN IMMUNODEFICIENCY VIRUS
KVYLAWVPAHKGIGG

SEQ ID NO: 14416 - protein, 15 aa, HUMAN IMMUNODEFICIENCY VIRUS
EKVYLAWVPAHKGIG

SEQ ID NO: 14417 - protein, 15 aa, HUMAN IMMUNODEFICIENCY VIRUS
QGQMVHQAISPRTLN

SEQ ID NO: 14418 - protein, 15 aa, HUMAN IMMUNODEFICIENCY VIRUS
SPAIFQSSMTKILEP

SEQ ID NO: 14419 - protein, 15 aa, HUMAN IMMUNODEFICIENCY VIRUS
FRKYTAFTIPSINNE

SEQ ID NO: 14420 - protein, 15 aa, HUMAN IMMUNODEFICIENCY VIRUS
HSNWRAMASDFNLPP

SEQ ID NO: 14421 - protein, 15 aa, HUMAN IMMUNODEFICIENCY VIRUS
KTAVQMAVFIHNFKR

SEQ ID NO: 14422 - protein, 9 aa, HUMAN IMMUNMODEFICIENCY VIRUS
VLAEAMSQV

SEQ ID NO: 14423 - skipped

SEQ ID NO: 14424 - protein, 10 aa, HUMAN IMMUNODEFICIENCY VIRUS
MASDFNLPPV

SEQ ID NO: 14425 - protein, 9 aa, HUMAN IMMUNODEFICIENCY VIRUS
KLVGKLNWA

SEQ ID NO: 14426 - protein, 9 aa, HUMAN IMMUNODEFICIENCY VIRUS
LVGPTPVNI

SEQ ID NO: 14427 - protein, 9 aa, HUMAN IMMUNODEFICIENCY VIRUS
ILKEPVHGV

SEQ ID NO: 14428 - protein, 9 aa, HUMAN IMMUNODEFICIENCY VIRUS
KAACWWAGI

SEQ ID NO: 14429 - protein, 10 aa, HUMAN IMMUNODEFICIENCY VIRUS
KMIGGIGGFI

SEQ ID NO: 14430 - protein, 9 aa, HUMAN IMMUNODEFICIENCY VIRUS
RAMASDFNL

SEQ ID NO: 14431 - protein, 9 aa, HUMAN IMMUNODEFICIENCY VIRUS
TLNFPISPI

SEQ ID NO: 14432 - protein, 9 aa, HUMAN IMMUNODEFICIENCY VIRUS
KLTPLCVTL

SEQ ID NO: 14433 - protein, 9 aa, HUMAN IMMUNODEFICIENCY VIRUS
LLQLTVWGI

SEQ ID NO: 14434 - protein, 10 aa, HUMAN IMMUNODEFICIENCY VIRUS
SLLNATDIAV

SEQ ID NO: 14435 - protein, 9 aa, HUMAN IMMUNODEFICIENCY VIRUS
LTFGWCFKL

SEQ ID NO: 14436 - protein, 9 aa, HUMAN IMMUNODEFICIENCY VIRUS
AIIRILQQL

SEQ ID NO: 14437 - protein, 9 aa, HUMAN IMMUNODEFICIENCY VIRUS
RILQQLLFI

SEQ ID NO: 14438 - protein, 10 aa, HUMAN IMMUNODEFICIENCY VIRUS
QMAVFIHNFK

SEQ ID NO: 14439 - protein, 11 aa, HUMAN IMMUNODEFICIENCY VIRUS
KVYLAWVPAHK

SEQ ID NO: 14440 - protein, 10 aa, HUMAN IMMUNODEFICIENCY VIRUS
KIQNFRVYYR

SEQ ID NO: 14441 - protein, 9 aa, HUMAN IMMUNODEFICIENCY VIRUS
MTKILEPFR

SEQ ID NO: 14442 - protein, 9 aa, HUMAN IMMUNODEFICIENCY VIRUS
AIFQSSMTK

SEQ ID NO: 14443 - protein, 10 aa, HUMAN IMMUNODEFICIENCY VIRUS
VTIKIGGQLK

SEQ ID NO: 14444 - protein, 10 aa, HUMAN IMMUNODEFICIENCY VIRUS
TTLFCASDAK

SEQ ID NO: 14445 - protein, 11 aa, HUMAN IMMUNODFICIENCY VIRUS
VTVYYGVPVWK

SEQ ID NO: 14446 - protein, 10 aa, HUMAN IMMUNODEFICIENCY VIRUS
QVPLRPMTYK

SEQ ID NO: 14447 - protein, 10 aa, HUMAN IMMUNODEFICIENCY VIRUS
VMIVWWQVDR

SEQ ID NO: 14448 - protein, 10 aa, HUMAN IMMUNODEFICIENCY VIRUS
QMVHQAISPR

SEQ ID NO: 14449 - protein, 10 aa, HUMAN IMMUNODEFICIENCY VIRUS
YPLASLRSLF

SEQ ID NO: 14450 - protein, 9 aa, HUMAN IMMUNODEFICIENCY VIRUS
HPVHAGPIA

SEQ ID NO: 14451 - protein, 9 aa, HUMAN IMMUNODEFICIENCY VIRUS
FPISPIETV

SEQ ID NO: 14452 - protein, 11 aa, HUMAN IMMUNODEFICIENCY VIRUS
IPYNPQSQGVV

SEQ ID NO: 14453 - protein, 9 aa, HUMAN IMMUNODEFICIENCY VIRUS
IPIHYCAPA

SEQ ID NO: 14454 - protein, 9 aa, HUMAN IMMUNODEFICIENCY VIRUS
CPKVSFEPI

SEQ ID NO: 14455 - protein, 9 aa, HUMAN IMMUNODEFICIENCY VIRUS
FPVRPQVPL

SEQ ID NO: 14456 - protein, 8 aa, HUMAN IMMUNODEFICIENCY VIRUS
VPLQLPPL

SEQ ID NO: 14457 - protein, 10 aa, HUMAN IMMUNODEFICIENCY VIRUS
EVNIVTDSQY

SEQ ID NO: 14458 - protein, 9 aa, HUMAN IMMUNODEFICIENCY VIRUS
FRDYVDRFY

SEQ ID NO: 14459 - protein, 10 aa, HUMAN IMMUNODEFICIENCY VIRUS
VIYQYMDDLY

SEQ ID NO: 14460 - protein, 10 aa, HUMAN IMMUNODEFICIENCY VIRUS
VTVLDVGDAY

SEQ ID NO: 14461 - protein, 9 aa, HUMAN IMMUNODEFICIENCY VIRUS
IYQEPFKNL

SEQ ID NO: 14462 - protein, 9 aa, HUMAN IMMUNODEFICIENCY VIRUS
PYNTPVFAI

SEQ ID NO: 14463 - protein, 9 aa, HUMAN IMMUNODEFICIENCY VIRUS
TYQIYQEPF

SEQ ID NO: 14464 - protein, 10 aa, HUMAN IMMUNODEFICIENCY VIRUS
YWQATWIPEW

SEQ ID NO: 14465 - protein, 9 aa, HUMAN IMMUNODEFICIENCY VIRUS
IWGCSGKLI

SEQ ID NO: 14466 - protein, 9 aa, HUMAN IMMUNODEFICIENCY VIRUS
RYLKDQQLL

SEQ ID NO: 14467 - protein, 10 aa, HUMAN IMMUNODEFICIENCY VIRUS
VWKEATTTLF

SEQ ID NO: 14468 - protein, 9 aa, HUMAN IMMUNODEFICIENCY VIRUS
IYETYGDTW

SEQ ID NO: 14469 - protein, 9 aa, HUMAN IMMUNODEFICIENCY VIRUS
PYNEWTLEL

SEQ ID NO: 14470 - protein, 15 aa, HUMAN IMMUNODEFICIENCY VIRUS
KRWIILGLNKIVRMY

SEQ ID NO: 14471 - protein, 14 aa, HUMAN IMMUNODEFICIENCY VIRUS
WEFVNTPPLVKLWY

SEQ ID NO: 14472 - protein, 15 aa, HUMAN IMMUNODEFICIENCY VIRUS
QKQITKIQNFRVYYR

SEQ ID NO: 14473 - protein, 15 aa, HUMAN IMMUNODEFICIENCY VIRUS
KVYLAWVPAHKGIGG

SEQ ID NO: 14474 - protein, 15 aa, HUMAN IMMUNODEFICIENCY VIRUS
GEIYKRWIILGLNKI

SEQ ID NO: 14475 - protein, 15 aa, HUMAN IMMUNODEFICIENCY VIRUS
EKVYLAWVPAHKGIG

SEQ ID NO: 14476 - protein, 15 aa, HUMAN IMMUNODEFICIENCY VIRUS
QHLLQLTVWGIKQLQ

SEQ ID NO: 14477 - protein, 15 aa, HUMAN IMMUNODEFICIENCY VIRUS
QGQMVHQAISPRTLN

SEQ ID NO: 14478 - protein, 15 aa, HUMAN IMMUNODEFICIENCY VIRUS
SPAIFQSSMTKILEP

SEQ ID NO: 14479 - protein, 16 aa, HUMAN IMMUNODEFICIENCY
IKQFINMWQEVGKAMY

SEQ ID NO: 14480 - protein, 15 aa, HUMAN IMMUNODEFICIENCY VIRUS
FRKYTAFTIPSINNE

SEQ ID NO: 14481 - protein, 15 aa, HUMAN IMMUNODEFICIENCY VIRUS
HSNWRAMASDFNLPP

SEQ ID NO: 14482 - protein, 15 aa, HUMAN IMMUNODEFICIENCY VIRUS
KTAVQMAVFIHNFKR

SEQ ID NO: 14483 - protein, 15 aa, HUMAN IMMUNODEFICIENCY VIRUS
YRKILRQRKIDRLID

SEQ ID NO: 14484 - protein, 15 aa, HUMAN IMMUNODEFICIENCY VIRUS
WAGIKQEFGIPYNPQ

SEQ ID NO: 14485 - protein, 15 aa, HUMAN IMMUNODEFICIENCY VIRUS
EVNIVTDSQYALGII

SEQ ID NO: 14486 - protein, 15 aa, HUMAN IMMUNODEFICIENCY VIRUS
AETFYVDGAANRETK

SEQ ID NO: 14487 - protein, 15 aa, HUMAN IMMUNODEFICIENCY VIRUS
GAVVIQDNSDIKVVP

SEQ ID NO: 14488 - protein, 14 aa, Tetanus toxoid
QYIKANSKFIGITE

SEQ ID NO: 14489 - protein, 21 aa, Plasmodium falciparum
DIEKKIAKMEKASSVFNVVNS

SEQ ID NO: 14490 - protein, 16 aa, Streptoccoccus sp.
GAVDSILGGVATYGAA

SEQ ID NO: 14491 - protein, 11 aa, Artificial Sequence
  pan-DR-epitope peptide
  MOD_RES 1, 13: Xaa = D-alanine or L-alanine
  MOD_RES 3: Xaa = cyclohexylalanine, Phe or Tyr
KXVWANTLKAA

SEQ ID NO: 14492 - protein, 9 aa, Artificial Sequence
  Standard Peptide 944.02
YLEPAIAKY

SEQ ID NO: 14493 - protein, 10 aa, Artificial Sequence
  Standard Peptide 944.01
FLPSDYFPSV

SEQ ID NO: 14494 - protein, 10 aa, Artificial Sequence
  Standard Peptide 944.01
FLPSDYFPSV

SEQ ID NO: 14495 - protein, 10 aa, Artificial Sequence
  ARTIFICIAL PEPTIDE
FLPSDYFPSV

SEQ ID NO: 14496 - protein, 9 aa, Artificial Sequence
  Standard Peptide 944.01
FLSDYFPSV

SEQ ID NO: 14497 - protein, 10 aa, Artificial Sequence
  Standard Peptide 944.01
FLPSDYFPSV

SEQ ID NO: 14498 - protein, 10 aa, Artificial Sequence
  Standard Peptide 944.01
FLPSDYFPSV

SEQ ID NO: 14499 - protein, 9 aa, Artificial Sequence
  Standard Peptide 1072.34
FTQAGYPAL

SEQ ID NO: 14500 - protein, 10 aa, Artificial Sequence
  Standard Peptide 941.12
KVFPYALINK

SEQ ID NO: 14501 - protein, 9 aa, Artificial Sequence
  Standard Peptide 940.06
AVDLYHFLK

SEQ ID NO: 14502 - protein, 10 aa, Artificial Sequence
  Standard Peptide 941.12
KVFPYALINK

SEQ ID NO: 14503 - protein, 11 aa, Artificial Sequence
  Standard Peptide 1083.02
STLPETYVVRR

SEQ ID NO: 14504 - protein, 10 aa, Artificial Sequence
  Standard Peptide 941.12
KVFPYALINK

SEQ ID NO: 14505 - protein, 9 aa, Artificial Sequence
  Standard Peptide 979.02
AYIDNYNKF

SEQ ID NO: 14506 - protein, 9 aa, Artificial Sequence
  Standard Peptide 1075.23
APRTLVYLL

SEQ ID NO: 14507 - protein, 9 aa, Artificial Sequence
  Standard Peptide 1021.05
FPFKYAAAF

SEQ ID NO: 14508 - protein, 9 aa, Artificial Sequence
  Standard Peptide 1021.05
FPFKYAAAF

SEQ ID NO: 14509 - protein, 9 aa, Artificial Sequence
  Standard Peptide 1021.05
FPFKYAAAF

SEQ ID NO: 14510 - protein, 9 aa, Artificial Sequence
  Standard Peptide 1021.05
FPFKYAAAF

SEQ ID NO: 14511 - protein, 13 aa, Artificial Sequence
  Standard Peptide 515.01
PKYVKQNTLKLAT

SEQ ID NO: 14512 - protein, 12 aa, Artificial Sequence
  Standard Peptide 829.02
YKTIAFDEEARR

SEQ ID NO: 14513 - protein, 13 aa, Artificial Sequence
  Standard Peptide 515.01
PKYVKQNTLKLAT

SEQ ID NO: 14514 - protein, 14 aa, Artificial Sequence
  Standard Peptide 717.01
YARFQSQTTLKQKT

SEQ ID NO: 14515 - protein, 14 aa, Artificial Sequence
  Standard Peptide 717.01
YARFQSQTTLKQKT

SEQ ID NO: 14516 - protein, 14 aa, Artificial Sequence
  Standard Peptide 553.01
QYIKANSKFIGITE

SEQ ID NO: 14517 - protein, 14 aa, Artificial Sequence
  Standard Peptide 553.01
QYIKANSKFIGITE

SEQ ID NO: 14518 - protein, 14 aa, Artificial Sequence
  Standard Peptide 553.01
QYIKANSKFIGITE

SEQ ID NO: 14519 - protein, 14 aa, Artificial Sequence
  Standard Peptide 553.01
QYIKANSKFIGITE

SEQ ID NO: 14520 - protein, 14 aa, Artificial Sequence
  Standard Peptide 553.01
QYIKANSKFIGITE

SEQ ID NO: 14521 - protein, 15 aa, Artificial Sequence
  Standard Peptide 1200.05
EALIHQLKINPYVLS

SEQ ID NO: 14522 - protein, 14 aa, Artificial Sequence
  Standard Peptide 650.22
QYIKANAKFIGITE

SEQ ID NO: 14523 - protein, 24 aa, Artificial Sequence
  Standard Peptide 507.02
GRTQDENPVVHFFKNIVTPRTPPP

SEQ ID NO: 14524 - protein, 13 aa, Artificial Sequence
  Standard Peptide 511
NGQIGNDPNRDIL

SEQ ID NO: 14525 - protein, 14 aa, Artificial Sequence
  Standard Peptide 717.01
YARFQSQTTLKQKT

SEQ ID NO: 14526 - protein, 13 aa, Artificial Sequence
  Standard Peptide 553.01
QYIKANSFIGITE

SEQ ID NO: 14527 - protein, 9 aa, Artificial Sequence
  HLA DR7-specific preferred motif
  MOD_RES 1: Xaa = Met, Phe, Leu, Ile, Val, Trp or Tyr
  MOD_RES 5: Xaa = any amino acid
  MOD_RES 6: Xaa = Ile, Val, Met, Ser, Ala, Cys, Thr, Pro or Leu
  MOD_RES 8: Xaa = any amino acid
  MOD_RES 9: Xaa = Ile or Val
XMWAXXMXX

SEQ ID NO: 14528 - protein, 9 aa, Artificial Sequence
  HLA DR7-specific deleterious motif
  MOD_RES 1: Xaa = any amino acid
  MOD_RES 3: Xaa = any amino acid
  MOD_RES 5: Xaa = any amino acid
  MOD_RES 6: Xaa = any amino acid
  MOD_RES 7: Xaa = Gly, Arg or Asp
XCXGXXXNG
